(19) United States
(12) Patent Application Publication
(10) Pub. No.: US 2024/0052428 A1
(43) Pub. Date: Feb. 15, 2024

(54) COMPOSITIONS AND METHODS FOR CHARACTERIZING LYMPHOMA AND RELATED CONDITIONS

(71) Applicants: The Broad Institute, Inc., Cambridge, MA (US); Dana-Farber Cancer Institute, Inc., Boston, MA (US); The General Hospital Corporation, Boston, MA (US)

(72) Inventors: Margaret SHIPP, Boston, MA (US); Gad GETZ, Boston, MA (US); Bjoern CHAPUY, Boston, MA (US); Kirsty WIENAND, Boston, MA (US); Donald STEWART, Cambridge, MA (US); Andrew DUNFORD, Cambridge, MA (US); Mark MURAKAMI, Boston, MA (US); Lee LAWTON, Boston, MA (US)

(73) Assignees: The Broad Institute, Inc., Cambridge, MA (US); Dana-Farber Cancer Institute, Inc., Boston, MA (US); The General Hospital Corporation, Boston, MA (US)

(21) Appl. No.: 18/468,298

(22) Filed: Sep. 15, 2023

Related U.S. Application Data
(63) Continuation of application No. PCT/US2022/020766, filed on Mar. 17, 2022.
(60) Provisional application No. 63/163,003, filed on Mar. 18, 2021.

(51) Int. Cl. C12Q 1/6886

(52) U.S. Cl. CPC C12Q 1/6886; C12Q 2600/156; C12Q 2600/112; C12Q 2600/106

(57) ABSTRACT

The invention provides compositions and methods useful in characterizing and/or treating classical Hodgkin's Lymphoma and/or primary mediastinal B-cell lymphoma (PMBL). In embodiments, the characterization is carried out using a biological sample comprising circulating tumor DNA (ctDNA) from a subject.

### CROSS-REFERENCE TO RELATED APPLICATIONS

[0001] This application is a continuation under 35 U.S.C. § 111(a) of PCT International Patent Application No. PCT/US2022/020766, filed Mar. 17, 2022, designating the United States and published in English, which claims priority to and the benefit of U.S. Provisional Application No. 63/163,003, filed Mar. 18, 2021, the entire contents of each of which are incorporated by reference herein.

### STATEMENT OF RIGHTS TO INVENTIONS MADE UNDER FEDERALLY SPONSORED RESEARCH

[0002] This invention was made with government support under Grant No. CA161026 awarded by the National Institutes of Health. The government has certain rights in the invention.

### SEQUENCE LISTING

[0003] The present application contains a Sequence Listing which has been submitted electronically in XML format following conversion from the originally filed TXT format.

[0004] The content of the electronic XML Sequence Listing, (Date of creation: Sep. 14, 2023; Size: 2,240,619 bytes; Name: 167741-031002US-Sequence_Listing.xml), is herein incorporated by reference in its entirety.

### BACKGROUND OF THE INVENTION

[0005] Classical Hodgkin lymphomas (cHLs) include rare malignant Hodgkin Reed-Stemberg (HRS) cells that are embedded within an extensive inflammatory/immune cell infiltrate. The paucity of tumor cells in biopsies of cHL (<2% of the total cellularity) precludes standard approaches to genomic characterization. Existing liquid biopsy assays and associated targeted sequencing panels do not include the recurrent alterations important for diagnosis and monitoring of cHL and related disease, such as primary mediastinal B-cell lymphoma (PMBL).

[0006] At present, there are no established molecular features that distinguish curable from non-curable cHLs. Patients with cHL (and PMBL) are currently restaged with PET/CT scans, which are notoriously imprecise in these fibrotic tumors with inflammatory infiltrates but often dictate changes in therapy. Moreover, current empiric sequencing platforms do not capture all of the recurrent genetic alterations, including copy number alterations (CNAs) and structural variations, needed to characterize perturbed signaling and immune recognition pathways or additional defining features, such as Epstein-Barr Virus (“EBV”) status, tumor mutational burden, and microsatellite instability.

### SUMMARY OF THE INVENTION

[0007] The invention of the disclosure provides compositions and methods useful for characterizing and/or treating classical Hodgkin's lymphoma (cHL), primary mediastinal B-cell lymphoma (PMBL) (PMBL), and/or related lymphoid malignancies. In embodiments, the characterization is carried out using a biological sample (e.g., biopsy, plasma sample comprising circulating tumor DNA (ctDNA)) from a subject.

[0008] In one aspect, the invention of the disclosure features a panel of oligonucleotides for characterizing a genetic alteration associated with classical Hodgkin's Lymphoma (cHL), or a related lymphoid malignancy. The panel of oligonucleotides characterize one or more of (i) a non-synonymous mutation in a polynucleotide(s) encoding a polypeptide(s) selected from one or more of ACTbeta, ADGRG6, ARID1A, B2M, CSF2RB, DNAH12, EEF1A1, GNA13, HLA-B, IGLL5, IKBKB, NFKBIA, NFKBIE, RBM38, SOCS1, STAT6, TNFAIP3, and XPO1; (ii) a structural variation in a polynucleotide(s) encoding a polypeptide(s) selected from one or more of CIITA and ETV6; and/or (iii) a copy number variation in a chromosomal locus selected from one or more of 2p, 2p15, 5p, 5q, 5p15.33, 9p, 9p24.1, 1p36.32, 1q41, 6p21.32, 6q, 6q12, 6q23.3, and 18q22.2.

[0009] In another aspect, the invention of the disclosure features a panel of oligonucleotides for characterizing a genetic alteration associated with primary mediastinal B-cell lymphoma (PMBL), or a related lymphoid malignancy. The panel of oligonucleotides characterize one or more of (i) a non-synonymous mutation in a polynucleotide(s) encoding a polypeptide(s) selected from one or more of B2M, CSF2RB, EZH2, GNA13, HIST2H2BE, HIST1H1E, IRF2BP2, IKZF3, IL4R, PAX5, STAT6, TP53, TNFAIP3, and XPO1, ZNF217; (ii) a structural variation in a polynucleotide(s) encoding a polypeptide(s) selected from one or more of CIITA, PD-L1, and PD-L2; and/or (iii) a copy number variation in a chromosomal locus selected from one or more of 2p, 2q. 2p16.1, 5p, 5q, 7p, 9p24.1, 9p, 9q, 6p21.33, 6q23.3, 7q, 15q15.3, 16p13.3, 19q13.32, 21q, and 22q13.2.

[0010] In another aspect, the invention of the disclosure features a method of characterizing a genetic alteration associated with classical Hodgkin's Lymphoma (cHL), primary mediastinal B-cell lymphoma (PMBL), or a related lymphoid malignancy. The method involves contacting a biological sample with the panel of any of the above aspects or embodiments thereof.

[0011] In another aspect, the invention of the disclosure features a method for characterizing tumor fraction and/or molecular tumor burden in a biological sample from a subject having or suspected of having classical Hodgkin's lymphoma (cHL) or primary mediastinal B-cell lymphoma (PMBL). The method involves, (a) sequencing polynucleotides derived from a biological sample to obtain sequence data, where the sequencing involves targeted sequencing carried out using the panel of any one of the above aspects or embodiments thereof. The method also involves (b) analyzing the sequence data to characterize copy number alterations, non-synonymous mutations, and structural variations. The method further involves (c) calculating three tumor fraction estimates, where the tumor fraction estimates are individually calculated based upon each of 1) the characterization of the copy number alterations, 2) the characterization of the non-synonymous mutations, and 3) the characterization of the structural variations, respectively. The method also involves (d) calculating a weighted sum of the tumor fraction estimates, thereby characterizing tumor fraction in the biological sample.

[0012] In another aspect, the invention of the disclosure features a method for selecting a subject for a treatment for classical Hodgkin's lymphoma, primary mediastinal B cell lymphoma (PMBL), or a related lymphoid malignancy. The method involves (a) sequencing polynucleotides derived from a biological sample to obtain sequence data, where the sequencing involves targeted sequencing carried out using the panel of any of the above aspects. The method also involves (b) analyzing the sequence data to characterize copy number alterations, non-synonymous mutations, and structural variations. The method further involves, (c) calculating three tumor fraction estimates, where the tumor fraction estimates are individually calculated based upon each of 1) the characterization of the copy number alterations, 2) the characterization of the non-synonymous mutations, and 3) the characterization of the structural variations, respectively. The method also involves (d) calculating a weighted sum of the tumor fraction estimates, where an increase in the weighted sum relative to a reference sequence selects the subject for treatment with an immune checkpoint blockade.

[0013] In another aspect, the invention of the disclosure involves a method of characterizing a classical Hodgkin's Lymphoma (cHL), or a related lymphoid malignancy. The method involves carrying out targeted sequencing of polynucleotides from a biological sample using a panel of oligonucleotides. The panel of oligonucleotides are useful in the characterization of one or more of (i) a non-synonymous mutation in a polynucleotide(s) encoding a polypeptide selected from one or more of ACTbeta, ADGRG6, ARID1A, B2M, CSF2RB, DNAH12, EEF1A1, GNA13, HLA-B, IGLL5, IKBKB, NFKBIA, NFKBIE, RBM38, SOCS1, STAT6, TNFAIP3, and XPO1; (ii) a structural variation in a polynucleotide(s) encoding a polypeptide selected from one or more of CIITA and ETV6; and/or (iii) a copy number variation in a chromosomal locus selected from one or more of 2p, 2p15, 5p, 5q, 5p15.33, 9p, 9p24.1, 1p36.32, 1q41, 6p21.32, 6q, 6q12, 6q23.3, and 18q22.2.

[0014] In another aspect, the invention of the disclosure features a method of characterizing a primary mediastinal B-cell lymphoma (PMBL), or a related lymphoid malignancy. The method involves carrying out targeted sequencing of polynucleotides from a biological sample using a panel of oligonucleotides. The panel of oligonucleotides are useful in the characterization of one or more of (i) a non-synonymous mutation in a polynucleotide(s) encoding a polypeptide selected from one or more of B2M, CSF2RB, EZH2, GNA13, HIST2H2BE, HIST1H1E, IRF2BP2, IKZF3, IL4R, PAX5, STAT6, TP53, TNFAIP3, and XPO1, ZNF217; (ii) a structural variation in a polynucleotide(s) encoding a polypeptide selected from one or more of CIITA, PD-L1, and PD-L2; and/or (iii) a copy number variation in a chromosomal locus selected from one or more of 2p, 2q. 2p16.1, 5p, 5q, 7p, 9p24.1, 9p, 9q, 6p21.33, 6q23.3, 7q, 15q15.3, 16p13.3, 19q13.32, 21q, and 22q13.2.

[0015] In another aspect, the invention of the disclosure features a method for treating a selected patient having or at risk of developing cHL, PMBL, or a related lymphoid malignancy. The method involves administering to the patient an immune checkpoint blockade agent where the patient is selected by characterizing a biological sample of the patient using the oligonucleotide panel of any of the above aspects.

[0016] In another aspect, the invention of the disclosure features a method for treating a selected patient having or at risk of developing cHL, PMBL, or a related lymphoid malignancy. The method involves administering to the patient a PD-1 blockade agent or a JAK/Stat inhibitor, where the patient is selected by characterizing a biological sample of the patient using the oligonucleotide panel of any of the above aspects.

[0017] In another aspect, the invention of the disclosure features a method for treating a selected patient having or at risk of developing cHL, PMBL, or a related lymphoid malignancy. The method involves administering to the patient a PD-1 blockade agent or a JAK/Stat inhibitor. The patient is selected by characterizing a biological sample of the patient using the oligonucleotide panel of any of the above aspects at a first point in time and comparing results from the characterization with a biological sample of the patient obtained at a second point in time.

[0018] In another aspect, the invention of the disclosure features a method for assessing a response to therapy for treatment of classical Hodgkin's Lymphoma (cHL), primary mediastinal B-cell lymphoma (PMBL), or a related lymphoid malignancy, based on changes in circulating tumor DNA (ctDNA). The method involves characterizing one or more of (i) a non-synonymous mutation in a polynucleotide(s) encoding a polypeptide(s) selected from one or more of ACTbeta, ADGRG6, ARID1A, B2M, CSF2RB, DNAH12, EEF1A1, EZH2, GNA13, HLA-B, HIST2H2BE, HIST1H1E, IGLL5, IKBKB, IRF2BP2, IKZF3, IL4R, NFKBIA, NFKBIE, RBM38, SOCS1, STAT6, TNFAIP3, TP53, XPO1 and ZNF217; (ii) a structural variation in a polynucleotide(s) encoding a polypeptide(s) selected from one or more of CIITA, ETV6, PD-L1, and PD-L2; and/or (iii) a copy number loss or gain in a chromosomal locus selected from one or more of 2p, 2p15, 2q. 2p16.1, 5p, 5q, 5p15.33, 6p21.33, 7p, 7q, 9p, 9q, 9p24.1, 1p36.32, 1q41, 6p21.32, 6q, 6q12, 6q23.3, 15q15.3, 16p13.3, 18q22.2, 21q, and 22q13.2.

[0019] In another aspect, the invention of the disclosure features a targeted sequencing panel containing oligonucleotides suitable for use in targeted sequencing to characterize two or more classes of variants in circulating tumor DNA. The panel of oligonucleotides characterize one or more of (i) a non-synonymous mutation in a polynucleotide(s) encoding one or more of ACTbeta, ADGRG6, ARID1A, B2M, CSF2RB, DNAH12, EEF1A1, EZH2, GNA13, HLA-B, HIST2H2BE, HIST1H1E, IGLL5, IKBKB, IRF2BP2, IKZF3, IL4R, NFKBIA, NFKBIE, RBM38, SOCS1, STAT6, TNFAIP3, TP53, XPO1 and ZNF217; (ii) a structural variation in a polynucleotide encoding a polypeptide(s) selected from one or more of CIITA, ETV6, PD-L1, and PD-L2; and/or (iii) a copy number loss or gain in a chromosomal locus selected from one or more of 2p, 2p15, 2q. 2p16.1, 5p, 5q, 5p15.33, 6p21.33, 7p, 7q, 9p, 9q, 9p24.1, 1p36.32, 1q41, 6p21.32, 6q, 6q12, 6q23.3, 15q15.3, 16p13.3, 18q22.2, 21q, and 22q13.2. The oligonucleotides are suitable for use in targeted sequencing to characterize all of the variants targeted by the baits listed in Table 1.

[0020] In another aspect, the invention of the disclosure features a targeted sequencing panel containing polynucleotides with at least 85% sequence identity over a span of at least 80 nucleotides to all baits listed in Table 1.

[0021] In another aspect, the invention of the disclosure features a targeted sequencing panel containing polynucleotides with at least 85% sequence identity over a span of at least 80 nucleotides to all of baits listed in Table 2.

[0022] In another aspect, the invention of the disclosure features a targeted sequencing panel containing polynucleotides with at least 85% sequence identity over a span of at least 80 nucleotides all baits listed in Tables 1 and 2.

[0023] In another aspect, the invention of the disclosure features a targeted sequencing panel containing polynucleotides with at least 85% sequence identity over a span of at least 80 nucleotides to all baits listed in Table 1 targeting microsatellite instability (MSI) variants.

[0024] In another aspect, the invention of the disclosure features a targeted sequencing panel, where the targeted sequencing panel contains polynucleotides with at least about 85% identity over a span of at least 80 nucleotides to all baits listed in Table 1 targeting chromosomal loci variants.

[0025] In any of the above aspects, or embodiments thereof, the chromosomal locus is selected from one or more of 2p15, 9p24.1, 1p36.32, 6p21.32, and 6q23.3. In any of the above aspects, or embodiments thereof, the oligonucleotides that characterizing the copy number variation characterize a copy number variation in a polynucleotide encoding a polypeptide selected from one or more of HLA-B, JAK2, NFKBIE, PD-L1, PD-L2, SOCS6, TNFAIP3, and XPO1. In any of the above aspects, or embodiments thereof, the chromosomal locus is selected from one or more of 9p24.1, 6q23.3, and 15q15.3. In any of the above aspects, or embodiments thereof, the oligonucleotides that characterize the copy number variation are useful in characterizing a copy number variation in a polynucleotide encoding a polypeptide selected from one or more of JAK2, PD-L1, PD-L2, and REL.

[0026] In any of the above aspects, or embodiments thereof, the panel contains primers and/or probes.

[0027] In any of the above aspects, or embodiments thereof, the panel characterizes a molecular features that increases sensitivity to PD-1.

[0028] In any of the above aspects, or embodiments thereof, one or more oligonucleotides in the panel hybridize to a portion of a polynucleotide that encodes a polypeptide.

[0029] In any of the above aspects, or embodiments thereof, the oligonucleotides tile the polynucleotide(s) and/or chromosomal locus. In any of the above aspects, or embodiments thereof, the chromosomal loci are tiled with probes at a density of about 1 probe every 100 or 200 kb. In any of the above aspects, or embodiments thereof, the oligonucleotides each contain from about 50 to about 200 nucleotides. In any of the above aspects, or embodiments thereof, the oligonucleotides each contain about 120 bp. In any of the above aspects, or embodiments thereof, one or more of the oligonucleotides hybridize to a single nucleotide polymorphism present in a polynucleotide(s) encoding one or more of the polypeptides. In any of the above aspects, or embodiments thereof, the panel of oligonucleotides are tiled at a density of about 1 probe every 200 kb. In any of the above aspects, or embodiments thereof, the panel of oligonucleotide probes contains at least about 12 probes per polynucleotide(s) and/or chromosomal locus.

[0030] In any of the above aspects, or embodiments thereof, the panel further contains oligonucleotides useful in characterizing one or more microsatellite loci selected from one or more of MSH2, MSH3, MSH6, MLH1, EXO1, PMS2, POLD1, and POLE.

[0031] In any of the above aspects, or embodiments thereof, the panel contains oligonucleotides that hybridize to LMP1 and/or EBNA1 genes of one or more Epstein bar viruses. In embodiments, the Epstein bar viruses are selected from one or more of Human gammaherpesvirus 4, Human herpesvirus 4 strain GD1, Human herpesvirus 4 strain GD2, Human herpesvirus 4 strain HKNPC1, Human herpesvirus 4 strain AG876, and Epstein-Barr virus strain B95-8.

[0032] In any of the above aspects, or embodiments thereof, the oligonucleotides contain unique molecular indices (UMIs).

[0033] In any of the above aspects, or embodiments thereof, the biological sample contains cell free DNA. In any of the above aspects, or embodiments thereof, the biological sample contains a bodily fluid and/or a tissue sample. In embodiments, the bodily fluid contains a human plasma sample. In embodiments, the tissue sample is a biopsy. In embodiments, the biopsy contains a primary tumor sample. In any of the above aspects, or embodiments thereof, the plasma sample contains at least about 5 ng of cell-free DNA.

[0034] In any of the above aspects, or embodiments thereof, calculating the weighted sum involves multiplying each tumor fraction estimate by a weight and then summing the resulting values, where the weights are inversely proportional to the variance of the calculation used to determine each respective tumor fraction estimate.

[0035] In any of the above aspects, or embodiments thereof, the immune checkpoint blockade targets a polypeptide selected from one or more of T cell receptor (TCR), CTLA-4, PD-1, LAG-3, BTLA, PD-1H, TIM-3/CEACAMI, TIGIT, CD96, CD112R, MHC, B7-1, B7-2, PD-L1, PD-L2, MHL-II, MVEM, PD-1H, Galectin-9, CD155, CD111, and CD112. In any of the above aspects, or embodiments thereof, the immune checkpoint blockade contains an agent selected from one or more of Atezolizumab, Avelumab, BMS-936559, Cemiplimab, Durvalumab, Nivolumab, Pembrolizumab, Sintilimab, and Tislelizumab. In embodiments, the agent contains nivolumab. In embodiments, the agent contains a combination of nivolumab, ifosfamide, carboplatin, and etoposide.

[0036] In any of the above aspects, or embodiments thereof, the method further involves converting the weighted sum to molecular tumor burden (MTB), and where the weighted sum is determined to be increased relative to the reference sequence if the MTB increases relative to a reference sequence.

[0037] In any of the above aspects, or embodiments thereof, the sequencing further involves sequencing cfDNA in the biological sample using ultra low-pass whole-genome sequencing (ULP WGS). In any of the above aspects, or embodiments thereof, the copy number alterations are characterized using ULP WGS sequencing data.

[0038] In any of the above aspects, or embodiments thereof, the subject is a human.

[0039] In any of the above aspects, or embodiments thereof, the non-synonymous mutation(s) resides in exonic regions. In any of the above aspects, or embodiments thereof, the oligonucleotides bind to the genome at only one location.

[0040] In any of the above aspects, or embodiments thereof, the panel of oligonucleotide probes is useful in the characterization of a structural variation containing recurrent breakpoints identified in cHL or PMBL.

[0041] In any of the above aspects, or embodiments thereof, the immune checkpoint blockade targets a polypeptide selected from one or more of T cell receptor (TCR), CTLA-4, PD-1, LAG-3, BTLA, PD-1H, TIM-3/CEACAMI, TIGIT, CD96, CD112R, MHC, B7-1, B7-2, PD-L1, PD-L2, MHL-II, MVEM, PD-1H, Galectin-9, CD155, CD111, and CD112.

[0042] In any of the above aspects, or embodiments thereof, the first point in time is prior to treatment and the second point in time is subsequent to treatment.

[0043] In any of the above aspects, or embodiments thereof, the panel further contains oligonucleotide sequences suitable for use in targeted sequencing to detect an Epstein Barr virus.

[0044] In any of the above aspects, or embodiments thereof, the targeted sequencing panel contains polynucleotides sharing at least 85% sequence identity over a span of at least 80 nucleotides to at least one bait listed in Table 1.

[0045] In any of the above aspects, or embodiments thereof, the targeted sequencing panel contains polynucleotides sharing at least 85% sequence identity over a span of at least 80 nucleotides to at least one bait listed in Table 1 for targeting each variant.

[0046] Compositions and articles defined by the invention were isolated or otherwise manufactured in connection with the examples provided below. Other features and advantages of the invention will be apparent from the detailed description, and from the claims.

### Definitions

[0047] Unless defined otherwise, all technical and scientific terms used herein have the meaning commonly understood by a person of ordinary skill in the art to which this invention belongs. The following references provide one of skill with a general definition of many of the terms used in this invention: Singleton et al., Dictionary of Microbiology and Molecular Biology (2nd ed. 1994); The Cambridge Dictionary of Science and Technology (Walker ed., 1988); The Glossary of Genetics, 5th Ed., R. Rieger et al. (eds.), Springer Verlag (1991); and Hale & Marham, The Harper Collins Dictionary of Biology (1991). As used herein, the following terms have the meanings ascribed to them below, unless specified otherwise.

[0048] As used herein, the term “algorithm” refers to any formula, model, mathematical equation, algorithmic, analytical, or programmed process, or statistical technique or classification analysis that takes one or more inputs or parameters, whether continuous or categorical, and calculates an output value, index, index value or score. Examples of algorithms include but are not limited to ratios, sums, regression operators such as exponents or coefficients, biomarker value transformations and normalizations (including, without limitation, normalization schemes that are based on clinical parameters such as age, gender, ethnicity, etc.), rules and guidelines, statistical classification models, statistical weights, and neural networks trained on populations or datasets.

[0049] By “alteration” is meant a change (increase or decrease) in the structure, expression levels or activity of a gene or polypeptide as detected by standard art known methods such as those described herein. As used herein, an alteration includes a 10% change in expression levels, preferably a 25% change, more preferably a 40% change, and most preferably a 50% or greater change in expression levels.

[0050] “Biological sample” as used herein refers to a sample obtained from a biological subject. Such samples include liquid and solid tissue samples, obtained, reached, or collected in vivo or in situ, that contains or is suspected of containing a polynucleotide. In some embodiments, a biological sample is a blood, serum, or plasma sample comprising ctDNA. In other embodiments, a biological sample also includes samples from a region of a biological subject containing precancerous or cancer cells or tissues. Such samples can be, but are not limited to, organs, tissues, fractions and cells isolated from mammals including, humans such as a patient, mice, and rats. Biological samples also may include sections of the biological sample including tissues, for example, frozen sections taken for histologic purposes.

[0051] By “circulating tumor DNA (ctDNA)” is meant cell-free DNA found in the bloodstream of a subject that is derived from neoplastic cells. In embodiments, the neoplasm is a cancer.

[0052] In this disclosure, “comprises,” “comprising,” “containing” and “having” and the like can have the meaning ascribed to them in U.S. Patent law and can mean “includes,” “including,” and the like; “consisting essentially of” or “consists essentially” likewise has the meaning ascribed in U.S. Patent law and the term is open-ended, allowing for the presence of more than that which is recited so long as basic or novel characteristics of that which is recited is not changed by the presence of more than that which is recited, but excludes prior art embodiments.

[0053] By “control” or “reference” is meant a standard of comparison. In one aspect, as used herein, “changed as compared to a control” sample or subject is understood as having a level that is statistically different than a sample from a normal, untreated, or control sample. Control samples include, for example, cells in culture, one or more laboratory test animals, one or more human subjects, or biological samples from the same (e.g., cfDNA). Methods to select and test control samples are within the ability of those in the art. Determination of statistical significance is within the ability of those skilled in the art, e.g., the number of standard deviations from the mean that constitute a positive result. In embodiments, a reference is a subject or a sample from a subject that does not have a cancer or a subject prior to a change in a treatment or administration of a drug or treatment. In embodiments, the reference is a matched normal sample or a panel of normals (PoN), where in some instances the matched normal sample is a sample from a healthy subject and/or a subject that does not have a cancer (e.g., a subject prior to being diagnosed with cHL or PMBL).

[0054] By “copy number variation (CNV),” “copy number alteration (CNA),” or “somatic copy number alteration (SCNA)” is meant an alteration that results in a gain or loss in copies of a section(s) of a genome. Non-limiting examples of SCNAs include duplications and deletions.

[0055] As used herein, the term “coverage” refers to the number of sequence reads that align to a specific locus in a reference sequence. In embodiments, the reference sequence is a reference genome. For example, with regard to the terminal base of the following reference sequence, because there is only one sample base aligned at this locus (the bold cytosine in Read 2), there is 1× coverage of the reference sequence at this locus. At the 5′ end, there is 3× coverage of the reference sequence at the 5′ terminus guanine.

| Reference Sequence: | 5′ GGGAAGGGCGATC 3′ |
|---|---|
| Read 1 | GGGAAGGGCGAT |
| Read 2 | GGGAAGGGCGATC |
| Read 3 | GGGAAGGGCG |

When a genome is sequenced, there will be a large number of nucleotides sequenced. If an individual genome is sequenced only once, there will be a significant number of sequencing errors. To increase the sequencing accuracy, an individual genome will need to be sequenced a large number of times. The average coverage for a whole genome can be calculated from the length of the original genome (G), the number of reads (N), and the average read length (L) as N×L/G. In another example, a hypothetical genome with 2,000 base pairs reconstructed from 8 reads with an average length of 500 nucleotides will have 2× redundancy. This parameter also enables one to estimate other quantities, such as the percentage of the genome covered by reads (sometimes also called breadth of coverage). At a coverage of 0.1×, only 10% of a reference sequence is covered by sequence reads. In embodiments, a sample polynucleotide is sequenced to a coverage of about, at least about, and/or no more than about 1e-8×, 1e-7×, 1e-6×, 1e-5×, 1e-4×, 1e-3×, 1e-2×, 0.05×, 0.1×, 0.2×, 0.3×, 0.4×, 0.5×, 1×, 2×, 3×, 4×, 5×, 7×, 8×, 9×, 10×, 20×, 30×, 40×, 50×, 60×, 70×, 90×, 100×, 200×, 300×, 400×, 500×, 600×, 700×, 800×, 900×, 1000×, 5000×, 10000×, 15000×, 20000×, 25000×, 30000×, 50000×, 100000×, or more.

[0056] By “ultra-low coverage” is meant a coverage of less than at least 5×. In some instances, ultra-low coverage is a coverage of less than 0.5×, 0.2×, or 0.1×.

[0057] “Detect” refers to identifying the presence, absence or amount of the analyte to be detected.

[0058] By “detectable label” is meant a composition that when linked to a molecule of interest renders the latter detectable, via spectroscopic, photochemical, biochemical, immunochemical, or chemical means. For example, useful labels include radioactive isotopes, magnetic beads, metallic beads, colloidal particles, fluorescent dyes, electron-dense reagents, enzymes (for example, as commonly used in an ELISA), biotin, digoxigenin, or haptens.

[0059] By “disease” is meant any condition or disorder that damages or interferes with the normal function of a cell, tissue, or organ. Examples of diseases include cancer (e.g., Hodgkin's lymphoma, primary mediastinal B-cell lymphoma), and related diseases or disorders.

[0060] By “effective amount” is meant the amount of an agent required to ameliorate the symptoms of a disease relative to an untreated patient. In some embodiments, an effective amount is an amount of an agent required to suppress, reduce, or eliminate a cancer (e.g., Hodgkin's lymphoma, primary mediastinal B-cell lymphoma). The effective amount of active compound(s) used to practice the present invention for therapeutic treatment of a disease varies depending upon the manner of administration, the age, body weight, and general health of the subject. Ultimately, the attending physician or veterinarian will decide the appropriate amount and dosage regimen. Such amount is referred to as an “effective” amount.

[0061] By “fragment” is meant a portion of a polypeptide or nucleic acid molecule. This portion contains, preferably, at least 10%, 20%, 30%, 40%, 50%, 60%, 70%, 80%, or 90% of the entire length of the reference nucleic acid molecule or polypeptide. A fragment may contain 10, 20, 30, 40, 50, 60, 70, 80, 90, or 100, 200, 300, 400, 500, 600, 700, 800, 900, or 1000 nucleotides or amino acids.

[0062] “Hybridization” means hydrogen bonding, which may be Watson-Crick, Hoogsteen or reversed Hoogsteen hydrogen bonding, between complementary nucleobases. For example, adenine and thymine are complementary nucleobases that pair through the formation of hydrogen bonds.

[0063] By “immunotherapy” is meant a treatment that involves supplementing or stimulating the immune system. Non-limiting examples of immunotherapies include treatments involving administration of biologics, such as immune checkpoint blockades, and/or CAR T cells.

[0064] By “immune checkpoint blockade” is meant an agent that functions as an inhibitor of a polynucleotide and/or pathway that functions in inhibiting or stimulating an immune response. In embodiments, the agent is an antibody. In embodiments, an immune checkpoint blockade inhibits the interaction of a receptor with its respective ligand (e.g., the interaction of PD-1 and PD-L1 and/or PD-L1). In some cases, the polynucleotide and/or pathway functions in inhibiting an immune response. In some instances, an immune checkpoint inhibitor inhibits T cell receptor (TCR), CTLA-4, PD-1, LAG-3, BTLA, PD-1H, TIM-3/CEACAMI, TIGIT, CD96, CD112R, MHC, B7-1, B7-2, PD-L1, PD-L2, MHL-II, MVEM, PD-1H, Galectin-9, CD155, CD111, CD112, or various combinations thereof. Non-limiting examples of immune checkpoint blockades include Atezolizumab (Tecentriq, MPDL3280A, RG7446), Avelumab (Bavencio, MSB0010718C), BMS-936559 (MDX-1105), Cemiplimab (Libtayo REGN-2810, REGN2810, cemiplimab-rwlc), Durvalumab (MED14736, MEDI-4736), Nivolumab (Opdivo ONO-4538, BMS-936558, MDX1106), Pembrolizumab (Keytruda, MK-3475), Sintilimab, Tislelizumab, and various combinations thereof.

[0065] By “increase” is meant to alter positively by at least 5% relative to a reference. An increase may be by 5%, 10%, 25%, 30%, 50%, 75%, or even by 100%.

[0066] The terms “isolated,” “purified,” or “biologically pure” refer to material that is free to varying degrees from components which normally accompany it as found in its native state. “Isolate” denotes a degree of separation from original source or surroundings. “Purify” denotes a degree of separation that is higher than isolation. A “purified” or “biologically pure” nucleic acid or protein is sufficiently free of other materials such that any impurities do not materially affect the biological properties of the nucleic acid or protein or cause other adverse consequences. That is, a nucleic acid or peptide of this disclosure is purified if it is substantially free of cellular material, viral material, or culture medium when produced by recombinant DNA techniques, or chemical precursors or other chemicals when chemically synthesized. Purity and homogeneity are typically determined using analytical chemistry techniques, for example, polyacrylamide gel electrophoresis or high-performance liquid chromatography. The term “purified” can denote that a nucleic acid or protein gives rise to essentially one band in an electrophoretic gel. For a protein that can be subjected to modifications, for example, phosphorylation or glycosylation, different modifications may give rise to different isolated proteins, which can be separately purified.

[0067] By “isolated polynucleotide” is meant a nucleic acid (e.g., a DNA) that is free of the genes which, in the naturally-occurring genome of the organism from which the nucleic acid molecule of this disclosure is derived, flank the gene. The term therefore includes, for example, a recombinant DNA that is incorporated into a vector; into an autonomously replicating plasmid or virus; or into the genomic DNA of a prokaryote or eukaryote; or that exists as a separate molecule (for example, a cDNA or a genomic or cDNA fragment produced by PCR or restriction endonuclease digestion) independent of other sequences. In addition, the term includes an RNA molecule that is transcribed from a DNA molecule, as well as a recombinant DNA that is part of a hybrid gene encoding additional polypeptide sequence.

[0068] By an “isolated polypeptide” is meant a polypeptide of the invention that has been separated from components that naturally accompany it. Typically, the polypeptide is isolated when it is at least 60%, by weight, free from the proteins and naturally-occurring organic molecules with which it is naturally associated. Preferably, the preparation is at least 75%, more preferably at least 90%, and most preferably at least 99%, by weight, a polypeptide of the invention. An isolated polypeptide of the invention may be obtained, for example, by extraction from a natural source, by expression of a recombinant nucleic acid encoding such a polypeptide; or by chemically synthesizing the protein. Purity can be measured by any appropriate method, for example, column chromatography, polyacrylamide gel electrophoresis, or by HPLC analysis.

[0069] By “liquid biopsy” is meant the isolation and analysis of tumor derived material from blood or other bodily fluids. In embodiments, the material contains DNA, RNA, and/or intact cells. In some cases, the material does not contain intact cells. In some instances the tumor-derived material is cell free DNA (cfDNA).

[0070] By “marker” is meant a protein, polynucleotide, or other analyte having an alteration in sequence, copy number, structure, expression level or activity that is associated with a disease or disorder. For example, a marker may include a non-synonymous mutation in a polynucleotide(s) encoding one or more of ACTbeta, ADGRG6, ARID1A, B2M, CSF2RB, DNAH12, EEF1A1, EZH2, GNA13, HLA-B, HIST2H2BE, HIST1H1E, IGLL5, IKBKB, IRF2BP2, IKZF3, IL4R, NFKBIA, NFKBIE, RBM38, SOCS1, STAT6, TNFAIP3, TP53, XPO1 and ZNF217; a structural variation in a polynucleotide encoding a polypeptide(s) selected from one or more of CIITA, ETV6, PD-L1, and PD-L2; and/or a copy number loss or gain in a chromosomal locus selected from one or more of 2p, 2p15, 2q. 2p16.1, 5p, 5q, 5p15.33, 6p21.33, 7p, 7q, 9p, 9q, 9p24.1, 1p36.32, 1q41, 6p21.32, 6q, 6q12, 6q23.3, 15q15.3, 16p13.3, 18q22.2, 21q, and 22q13.2. Such alterations are detected, for example, using a set of probes that tile portions of the aforementioned polynucleotides and/or loci.

[0071] By “molecular tumor burden” is meant an expression of the amount of tumor-derived DNA in a biological sample expressed as units of Human Genome Equivalents per ml of sample. Methods for calculating molecular tumor burden from tumor fraction of DNA in a sample (e.g., a biological sample containing cfDNA) are known to those of ordinary skill in the art, as the calculation is a simple unit conversion. In some instances, the molecular tumor burden is calculated using a weighted combination of different estimates of tumor fraction in a biological sample and, in such instances, the molecular tumor burden may be referred to as an “integrative molecular tumor burden” (FIG. 23).

[0072] As used herein, the term “next-generation sequencing (NGS)” refers to a variety of high-throughput sequencing technologies that parallelize the sequencing process, producing thousands or millions of sequence reads at once. NGS parallelization of sequencing reactions can generate hundreds of megabases to gigabases of nucleotide sequence reads in a single instrument run. Unlike conventional sequencing techniques, such as Sanger sequencing, which typically report the average genotype of an aggregate collection of molecules, NGS technologies typically digitally tabulate the sequence of numerous individual DNA fragments (sequence reads discussed in detail below), such that low frequency variants (e.g., variants present at less than about 10%, 5% or 1% frequency in a heterogeneous population of nucleic acid molecules) can be detected. The term “massively parallel” can also be used to refer to the simultaneous generation of sequence information from many different template molecules by NGS. NGS sequencing platforms include, but are not limited to, the following: Massively Parallel Signature Sequencing (Lynx Therapeutics); 454 pyro-sequencing (454 Life Sciences/Roche Diagnostics); solid-phase, reversible dye-terminator sequencing (Solexa/Illumina); SOLiD technology (Applied Biosystems); Ion semiconductor sequencing (ion Torrent); and DNA nanoball sequencing (Complete Genomics). Descriptions of certain NGS platforms can be found in the following: Shendure, et al., “Next-generation DNA sequencing,” Nature, 2008, vol. 26, No. 10, 135-1 145; Mardis, “The impact of next-generation sequencing technology on genetics,” Trends in Genetics, 2007, vol. 24, No. 3, pp. 133-141; Su, et al., “Next-generation sequencing and its applications in molecular diagnostics” Expert Rev Mol Diagn, 2011, 11 (3):333-43; and Zhang et al., “The impact of next-generation sequencing on genomics,” J Genet Genomics, 201, 38(3): 95-109.

[0073] By “non-synonymous mutation” is meant an alteration to a polynucleotide sequence encoding a polypeptide that alters the amino acid sequence of the encoded polypeptide. Non-limiting examples of non-synonymous mutations include single-nucleotide polymorphisms (SNPs), single-nucleotide variations (SNVs), and insertions or deletions (indel mutations). In embodiments, a non-synonymous mutation corresponds to a genomic region about or less than about 1 bp, 2 bp, 3 bp, 4 bp, 5 bp, 10 bp, 50 bp, or 100 bp in size.

[0074] As used herein, “obtaining” as in “obtaining an agent” includes synthesizing, purchasing, or otherwise acquiring the agent.

[0075] By “polypeptide” or “amino acid sequence” is meant any chain of amino acids, regardless of length or post-translational modification. In various embodiments, the post-translational modification is glycosylation or phosphorylation. In various embodiments, conservative amino acid substitutions may be made to a polypeptide to provide functionally equivalent variants, or homologs of the polypeptide. In some aspects the invention embraces sequence alterations that result in conservative amino acid substitutions. In some embodiments, a “conservative amino acid substitution” refers to an amino acid substitution that does not alter the relative charge or size characteristics of the protein in which the conservative amino acid substitution is made. Variants can be prepared according to methods for altering polypeptide sequence known to one of ordinary skill in the art such as are found in references that compile such methods, e.g. Molecular Cloning: A Laboratory Manual, J. Sambrook, et al., eds., Second Edition, Cold Spring Harbor Laboratory Press, Cold Spring Harbor, N.Y., 1989, or Current Protocols in Molecular Biology, F. M. Ausubel, et al., eds., John Wiley & Sons, Inc., New York. Non-limiting examples of conservative substitutions of amino acids include substitutions made among amino acids within the following groups: (a) M, I, L, V; (b) F, Y, W; (c) K, R, H; (d) A, G; (e) S, T; (f) Q, N; and (g) E, D. In various embodiments, conservative amino acid substitutions can be made to the amino acid sequence of the proteins and polypeptides disclosed herein.

[0076] By “reduce” is meant to alter negatively by at least 5% relative to a reference. A reduction may be by 5%, 10%, 25%, 30%, 50%, 75%, or even by 100%.

[0077] A “reference genome” is a defined genome used as a basis for genome comparison or for alignment of sequencing reads thereto. A reference genome may be a subset of or the entirety of a specified genome; for example, a subset of a genome sequence, such as exome sequence, or the complete genome sequence.

[0078] A “reference sequence” is a defined sequence used as a basis for sequence comparison. A reference sequence may be a subset of or the entirety of a specified sequence; for example, a segment of a full-length cDNA or gene sequence, or the complete cDNA or gene sequence. For polypeptides, the length of the reference polypeptide sequence will generally be at least about 16 amino acids, preferably at least about 20 amino acids, more preferably at least about 25 amino acids, and even more preferably about 35 amino acids, about 50 amino acids, or about 100 amino acids. For nucleic acids, the length of the reference nucleic acid sequence will generally be at least about 50 nucleotides, preferably at least about 60 nucleotides, more preferably at least about 75 nucleotides, and even more preferably about 100 nucleotides or about 300 nucleotides or any integer thereabout or therebetween. In embodiments a “reference sequence” is the meant a single genome from a healthy donor or a representative genome that reflects input from a set of genomes In some cases, a “reference sequence” is a sequence of a polynucleotide sample (e.g., a cfDNA sample) collected from a healthy subject or from a panel of healthy subjects. In embodiments, the “reference sequence” is a collection of polynucleotide sequences corresponding to a panel of healthy subjects.

[0079] Nucleic acid molecules useful in the methods of the invention include any nucleic acid molecule that encodes a polypeptide of the invention or a fragment thereof. Such nucleic acid molecules need not be 100% identical with an endogenous nucleic acid sequence, but will typically exhibit substantial identity. Polynucleotides having “substantial identity” to an endogenous sequence are typically capable of hybridizing with at least one strand of a double-stranded nucleic acid molecule. Nucleic acid molecules useful in the methods of the invention include any nucleic acid molecule that encodes a polypeptide of the invention or a fragment thereof. Such nucleic acid molecules need not be 100% identical with an endogenous nucleic acid sequence, but will typically exhibit substantial identity. Polynucleotides having “substantial identity” to an endogenous sequence are typically capable of hybridizing with at least one strand of a double-stranded nucleic acid molecule.

[0080] By “hybridize” is meant pair to form a double-stranded molecule between complementary polynucleotide sequences (e.g., a gene described herein), or portions thereof, under various conditions of stringency. (See, e.g., Wahl, G. M. and S. L. Berger (1987) Methods Enzymol. 152:399; Kimmel, A. R. (1987) Methods Enzymol. 152:507).

[0081] For example, stringent salt concentration will ordinarily be less than about 750 mM NaCl and 75 mM trisodium citrate, preferably less than about 500 mM NaCl and 50 mM trisodium citrate, and more preferably less than about 250 mM NaCl and 25 mM trisodium citrate. Low stringency hybridization can be obtained in the absence of organic solvent, e.g., formamide, while high stringency hybridization can be obtained in the presence of at least about 35% formamide, and more preferably at least about 50% formamide. Stringent temperature conditions will ordinarily include temperatures of at least about 30° C., more preferably of at least about 37° C., and most preferably of at least about 42° C. Varying additional parameters, such as hybridization time, the concentration of detergent, e.g., sodium dodecyl sulfate (SDS), and the inclusion or exclusion of carrier DNA, are well known to those skilled in the art. Various levels of stringency are accomplished by combining these various conditions as needed. In a preferred embodiment, hybridization will occur at 30° C. in 750 mM NaCl, 75 mM trisodium citrate, and 1% SDS. In a more preferred embodiment, hybridization will occur at 37° C. in 500 mM NaCl, 50 mM trisodium citrate, 1% SDS, 35% formamide, and 100 μg/ml denatured salmon sperm DNA (ssDNA). In a most preferred embodiment, hybridization will occur at 42° C. in 250 mM NaCl, 25 mM trisodium citrate, 1% SDS, 50% formamide, and 200 μg/ml ssDNA. Useful variations on these conditions will be readily apparent to those skilled in the art.

[0082] For most applications, washing steps that follow hybridization will also vary in stringency. Wash stringency conditions can be defined by salt concentration and by temperature. As above, wash stringency can be increased by decreasing salt concentration or by increasing temperature. For example, stringent salt concentration for the wash steps will preferably be less than about 30 mM NaCl and 3 mM trisodium citrate, and most preferably less than about 15 mM NaCl and 1.5 mM trisodium citrate. Stringent temperature conditions for the wash steps will ordinarily include a temperature of at least about 25° C., more preferably of at least about 42° C., and even more preferably of at least about 68° C. In a preferred embodiment, wash steps will occur at 25° C. in 30 mM NaCl, 3 mM trisodium citrate, and 0.1% SDS. In a more preferred embodiment, wash steps will occur at 42° C. in 15 mM NaCl, 1.5 mM trisodium citrate, and 0.10% SDS. In a more preferred embodiment, wash steps will occur at 68° C. in 15 mM NaCl, 1.5 mM trisodium citrate, and 0.1% SDS. Additional variations on these conditions will be readily apparent to those skilled in the art. Hybridization techniques are well known to those skilled in the art and are described, for example, in Benton and Davis (Science 196:180, 1977); Grunstein and Hogness (Proc. Natl. Acad. Sci., USA 72:3961, 1975); Ausubel et al. (Current Protocols in Molecular Biology, Wiley Interscience, New York, 2001); Berger and Kimmel (Guide to Molecular Cloning Techniques, 1987, Academic Press, New York); and Sambrook et al., Molecular Cloning: A Laboratory Manual, Cold Spring Harbor Laboratory Press, New York.

[0083] The phrase “pharmaceutically acceptable carrier” is recognized in the art and includes a pharmaceutically acceptable material, composition or vehicle, suitable for administering compounds of the present disclosure to a subject. The carriers include liquid or solid filler, diluent, excipient, solvent or encapsulating material, involved in carrying or transporting the subject agent from one organ, or portion of the body, to another organ, or portion of the body. Each carrier must be “acceptable” in the sense of being compatible with the other ingredients of the formulation and not injurious to the patient. Some non-limiting examples of materials which can serve as pharmaceutically acceptable carriers include the following: sugars, such as lactose, glucose and sucrose; starches, such as corn starch and potato starch; cellulose, and its derivatives, such as sodium carboxymethyl cellulose, ethyl cellulose and cellulose acetate; powdered tragacanth; malt; gelatin; talc; excipients, such as cocoa butter and suppository waxes; oils, such as peanut oil, cottonseed oil, safflower oil, sesame oil, olive oil, corn oil and soybean oil; glycols, such as propylene glycol; polyols, such as glycerin, sorbitol, mannitol and polyethylene glycol; esters, such as ethyl oleate and ethyl laurate; agar; buffering agents, such as magnesium hydroxide and aluminum hydroxide; alginic acid; pyrogen-free water; isotonic saline; Ringer's solution; ethyl alcohol; phosphate buffer solutions; and other non-toxic compatible substances employed in pharmaceutical formulations.

[0084] The term “salts” refers to the relatively non-toxic, inorganic and organic acid addition salts of compounds of the present disclosure. These salts can be prepared in situ during the final isolation and purification of compounds or by separately reacting a purified compound in its free base form with a suitable organic or inorganic acid and isolating the salt thus formed. Representative salts include the hydrobromide, hydrochloride, sulfate, bisulfate, nitrate, acetate, oxalate, valerate, oleate, palmitate, stearate, laurate, borate, benzoate, lactate, phosphate, tosylate, citrate, maleate, fumarate, succinate, tartrate, naphthylate mesylate, glucoheptonate, lactobionate and laurylsulphonate salts, and the like. Representative salts may further include cations based on the alkali and alkaline earth metals, such as sodium, lithium, potassium, calcium, magnesium, and the like, as well as non-toxic ammonium, tetramethylammonium, tetramethyl ammonium, methlyamine, dimethlyamine, trimethlyamine, triethlyamine, ethylamine, and the like. (See, for example, S. M. Barge et al., “Pharmaceutical Salts,” J. Pharm. Sci., 1977, 66:1-19 which is incorporated herein by reference.).

[0085] By “structural variation (SV)” is meant a large alteration in the sequence of a genome. Non-limiting examples of structural variants include gene fusions, translocations, deletions, duplications, inversions, and translocations. In embodiments, a structural variation corresponds to a genomic region that is about or at least about 100 bp, 500 bp, 1 kb, 10 kb, 100 kb, 1 Mb, 2 Mb, 3 Mb 4 Mb, 5 Mb or 10 Mb in size.

[0086] By “substantially identical” is meant a polypeptide or nucleic acid molecule exhibiting at least 50% identity to a reference amino acid sequence (for example, any one of the amino acid sequences described herein) or nucleic acid sequence (for example, any one of the nucleic acid sequences described herein). Preferably, such a sequence is at least 60%, more preferably 80% or 85%, and more preferably 90%, 95% or even 99% identical at the amino acid level or nucleic acid to the sequence used for comparison.

[0087] Sequence identity is typically measured using sequence analysis software (for example, Sequence Analysis Software Package of the Genetics Computer Group, University of Wisconsin Biotechnology Center, 1710 University Avenue, Madison, Wis. 53705, BLAST, BESTFIT, GAP, or PILEUP/PRETTYBOX programs). Such software matches identical or similar sequences by assigning degrees of homology to various substitutions, deletions, and/or other modifications. Conservative substitutions typically include substitutions within the following groups: glycine, alanine; valine, isoleucine, leucine; aspartic acid, glutamic acid, asparagine, glutamine; serine, threonine; lysine, arginine; and phenylalanine, tyrosine. In an exemplary approach to determining the degree of identity, a BLAST program may be used, with a probability score between e⁻³ and e⁻¹⁰⁰ indicating a closely related sequence.

[0088] “Primer set” means a set of oligonucleotides that hybridizes to a target polynucleotide. A primer set would consist of at least 2, 4, 6, 8, 10, 12, 14, 16, 18, 20, 30, 40, 50, 60, 80, 100, 200, 250, 300, 400, 500, 600, or more primers. In particular embodiments a primer described herein is used, for example, in amplification, sequencing, and the like

[0089] By “Probe set” or “bait set” is meant a set of probes that hybridize to and characterize a target polynucleotide.

[0090] By “reduces” is meant a negative alteration of at least 10%, 25%, 50%, 75%, or 100%.

[0091] By “reference” is meant a standard or control condition. As used herein, “changed as compared to a reference” sample or subject is understood as having a level that is statistically different than a sample from a normal, untreated, or reference sample. Reference samples include, for example, cells in culture, one or more laboratory test animals, or one or more human subjects. Methods to select and test reference samples are within the ability of those in the art. Determination of statistical significance is within the ability of those skilled in the art, e.g., the number of standard deviations from the mean that constitute a positive result. In one embodiment, the response of a subject having a disease (e.g., cHL, PMBL) treated with an agent is compared to a reference, which would include the response of an untreated control subject or the disease state of the subject prior to treatment.

[0092] A “reference sequence” is a defined sequence used as a basis for sequence comparison. A reference sequence may be a subset of or the entirety of a specified sequence; for example, a segment of a full-length cDNA or gene sequence, or the complete cDNA or gene sequence. For polypeptides, the length of the reference polypeptide sequence will generally be at least about 16 amino acids, preferably at least about 20 amino acids, more preferably at least about 25 amino acids, and even more preferably about 35 amino acids, about 50 amino acids, or about 100 amino acids. For nucleic acids, the length of the reference nucleic acid sequence will generally be at least about 50 nucleotides, preferably at least about 60 nucleotides, more preferably at least about 75 nucleotides, and even more preferably about 100 nucleotides or about 300 nucleotides or any integer thereabout or therebetween.

[0093] By “subject” is meant an animal. The animal can be a mammal. The mammal can be a human or non-human mammal, such as a bovine, equine, canine, ovine, rodent, or feline.

[0094] Ranges provided herein are understood to be shorthand for all of the values within the range. For example, a range of 1 to 50 is understood to include any number, combination of numbers, or sub-range from the group consisting 1, 2, 3, 4, 5, 6, 7, 8, 9, 10, 11, 12, 13, 14, 15, 16, 17, 18, 19, 20, 21, 22, 23, 24, 25, 26, 27, 28, 29, 30, 31, 32, 33, 34, 35, 36, 37, 38, 39, 40, 41, 42, 43, 44, 45, 46, 47, 48, 49, or 50.

[0095] Nucleic acid molecules useful in the methods of the invention include any nucleic acid molecule that encodes a polypeptide of the invention or a fragment thereof. Such nucleic acid molecules need not be 100% identical with an endogenous nucleic acid sequence, but will typically exhibit substantial identity. Polynucleotides having “substantial identity” to an endogenous sequence are typically capable of hybridizing with at least one strand of a double-stranded nucleic acid molecule. Nucleic acid molecules useful in the methods of the invention include any nucleic acid molecule that encodes a polypeptide of the invention or a fragment thereof. Such nucleic acid molecules need not be 100% identical with an endogenous nucleic acid sequence, but will typically exhibit substantial identity. Polynucleotides having “substantial identity” to an endogenous sequence are typically capable of hybridizing with at least one strand of a double-stranded nucleic acid molecule. By “hybridize” is meant pair to form a double-stranded molecule between complementary polynucleotide sequences (e.g., a gene described herein), or portions thereof, under various conditions of stringency. (See, e.g., Wahl, G. M. and S. L. Berger (1987) Methods Enzymol. 152:399; Kimmel, A. R. (1987) Methods Enzymol. 152:507).

[0096] By “targeted sequencing” is meant a sequencing method where polynucleotide sequences of interest from a biological sample are selectively sequenced. In embodiments, targeted contacting polynucleotides present in a biological sample with an oligonucleotide probe or panel of oligonucleotide probes. In embodiments, targeted sequencing involves enriching for polynucleotide sequences from a sample that hybridize to an oligonucleotide probe or panel of oligonucleotide probes. In various instances, targeted sequencing has the advantage of allowing for sequencing polynucleotide sequences of interest in a biological sample to a high sequencing coverage.

[0097] By “tiling” is meant selecting a set of oligonucleotide probes such that the probe sequences target different portions of a common gene or genomic region. In embodiments, the probes each uniquely bind to a genome at about or less than about 1, 2, 3, 4, or 5 unique positions. In embodiments, the probes are selected so that the probes bind to the common gene or genomic region at a density of about 1, 2, 3, 4, 5, 6, 7, 8, 9, 10, 20, 30, 40, 50, or 100 probes per 1 kb, 2 kb, 3 kb, 4 kb, 5 kb, 10 kb, 50 kb, 75 kb, 100 kb, 150 kb, 200 kb, 250 kb, 300 kb, 350 kb, 400 kb, 450 kb, 500 kb, or 1000 kb of the gene or genomic region. In embodiments, the probes are about evenly spaced over the genomic region. In embodiments, the set of oligonucleotide probes contains about, at least about, and/or no more than about 1, 2, 3, 4, 5, 6, 7, 8, 9, 10, 11, 12, 13, 14, 15, 20, 25, 30, 35, 40, 45, 50, 75, 100, 150, 200, 250, 300, 350, 400, 450, or 500 oligonucleotide probes that bind to the common gene or genomic region. In some cases, a probe set is tiled across multiple genes and/or genomic regions, and in some instances the probe set contains about, at least about, and/or no more than about 1, 2, 3, 4, 5, 6, 7, 8, 9, 10, 11, 12, 13, 14, 15, 20, 25, 30, 35, 40, 45, 50, 75, 100, 150, 200, 250, 300, 350, 400, 450, or 500 oligonucleotide probes that bind to each gene and/or genomic region.

[0098] As used herein, the terms “treatment,” “treating,” “treat” and the like, refer to obtaining a desired pharmacologic and/or physiologic effect. “Treatment,” as used herein, covers any treatment of a disease or condition in a mammal, particularly in a human, and includes inhibiting the disease (e.g., arresting its development) and/or relieving the disease (e.g., causing regression of the disease). In embodiments, treatment ameliorates at least one symptom of cHL or PMBL. For example, a treatment can result in a reduction in tumor size, tumor growth, cancer cell number, cancer cell growth, or metastasis or risk of metastasis.

[0099] “Tumor-derived DNA” means DNA that is derived from a cancer cell rather than a healthy control cell. Tumor derived DNA often includes structural changes that are indicative of cancer.

[0100] The term “tumor fraction” means the portion of DNA in a sample derived from or predicted to be derived from neoplastic cells. In embodiments, the DNA is cell free DNA (cfDNA).

[0101] Unless specifically stated or obvious from context, as used herein, the term “or” is understood to be inclusive. Unless specifically stated or obvious from context, as used herein, the terms “a”, “an”, and “the” are understood to be singular or plural.

[0102] Unless specifically stated or obvious from context, as used herein, the term “about” is understood as within a range of normal tolerance in the art, for example within 2 standard deviations of the mean.

[0103] The recitation of a listing of chemical groups in any definition of a variable herein includes definitions of that variable as any single group or combination of listed groups. The recitation of an embodiment for a variable or aspect herein includes that embodiment as any single embodiment or in combination with any other embodiments or portions thereof.

[0104] Any compositions or methods provided herein can be combined with one or more of any of the other compositions and methods provided herein.

### BRIEF DESCRIPTION OF THE DRAWINGS

[0105] FIG. 1 provides a schematic diagram providing an overview of the genetics of Hodgkin's lymphoma. The diagram includes an overview of an analysis of the genetic alterations, including mutations, somatic copy number alterations (SCNAs), and structural variations in cHL. The inset table (A) provides a graphical representation of genes perturbed by copy number alterations. Mutations or SVs that are known to inactivate the involved proteins are noted (^{⊥}).

[0106] FIG. 2A-2C provide shade-coded matrices and a mirror plot showing genetic drivers in cHL. FIG. 2A provides a shade-coded matrix showing recurrent alterations in cHL tumors and cell lines, along with EBV status and morphological subtype noted. Right-pointing arrows indicate copy number gain. Left-pointing arrows indicate copy number loss. Lines indicate structural variants. Non-synonymous mutations are not marked. FIG. 2B provides a shade-coded matrix showing recurrent alterations in PMBL tumors and cell lines. Right-pointing arrows indicate copy number gain. Left-pointingarrows indicate copy number loss. Lines indicate structural variants. Non-synonymous mutations are not marked. FIG. 2C provides a mirror plot illustrating centric to recurrent genetic alterations identified in cHL, comparing recurrent alterations in cHL and PMBL. Non-synonymous mutations, Copy number gain, Copy number loss, and structural variants are indicated.

[0107] FIG. 3 provides a pie graph showing the targeted sequencing panel composition.

[0108] FIG. 4 provides a shade-coded matrix relating to initial quality control of a targeted sequencing panel carried out using cHL and PMBL cell lines. The matrix shows recurrent alterations in cHL (cell lines L-1236, L-540, L-428, HDLM2, SUPHD1, and KMH2) and PMBL (cell lines Farage and U-2940), detected using whole exome sequencing.

[0109] FIG. 5 provides a shaded chart showing the lymphoma cells lines used for panel cHL/PMBLv2 quality control analysis.

[0110] FIGS. 6A and 6B provide a shaded chart and a plot. FIG. 6A provides a shaded chart showing Picard metrics for targeted sequencing panel cHL/PMBLv2 quality control analysis carried out using cell lines. FIG. 6B provides a plot showing the proportion of target coverage with X coverage for the targeted sequencing panel panel cHL/PMBLv2 quality control analysis using the cell lines.

[0111] FIG. 7 provides a series of box-and-wisker plots showing the proportion of targets with X coverage for the targeted sequencing panel cHL/PMBLv2 using the cell lines.

[0112] FIG. 8 provides a series of box-and-wisker plots showing the proportion of gene targets with X coverage for the targeted sequencing panel panel cHL/PMBLv2 using the cell lines.

[0113] FIG. 9 provides a series of box-and-wisker plots showing the proportion of focal targets (focal CNAs; SNP probes) with X coverage for the targeted sequencing panel cHL/PMBLv2 using the cell lines.

[0114] FIG. 10 shows the proportion of structural variants “SV” with X coverage for the targeted sequencing panel cHL/PMBLv2 using the cell lines.

[0115] FIG. 11 provides a series of box-and-wisker plots showing the proportion of microsatellite instability (“MSI”) targets with X coverage for the targeted sequencing panel cHL/PMBLv2 using the cell lines.

[0116] FIG. 12 provides a series of box-and-wisker plots showing the proportion of tumor mutational burden (“TMB”) targets with X coverage for the targeted sequencing panel cHL/PMBLv2 using the cell lines.

[0117] FIG. 13 provides a shaded chart showing Epstein-Barr Virus (“EBV”) detection in various lymphoma cell lines using the targeted sequencing panel panel cHL/PMBLv2.

[0118] FIG. 14 provides a CoMut plot for previously characterized cHL/PMBL cell lines showing recurrent mutations and EBV status. The plot provides a comparison of the targeted sequencing panel (TP) and previously performed whole exome sequencing (WES). Samples are plotted on the x axis (WES=Whole Exome Sequencing, TP=Targeted Panel) and genes/EBV status plotted on the y axis. The shading of each tile reflects the variant detected in an indicated gene. WES mutations, were filtered to the set of mutations covered by the targeted panel. The top 50% of identified recurrent mutations are shown.

[0119] FIG. 15 provides an image of a computer output showing Epstein-Barr Virus (“EBV”) detection in an EBV+ cell line (Farage) using the targeted sequencing panel of the disclosure.

[0120] FIG. 16 provides a plot showing copy number alteration (“CNA”) detection in various lymphoma cell lines using the targeted sequencing panel.

[0121] FIG. 17 provides an image of a computer output showing an exemplary CNA detection of a 2p15 copy number gain somatic copy number alteration in the cell lines.

[0122] FIG. 18 provides an image of a computer output showing an exemplary CNA detection of a 9p/9p24.1 copy number gain somatic copy number alteration in the cell lines.

[0123] FIG. 19 provides an image of a computer output showing the detection of a CIITA translocation (SV) in a PMBL cell line. Top, TWIST, VAF approximately 30%; Bottom, CCGD, VAF approximately 50%. Not targeted: only ALT allele.

[0124] FIG. 20 provides a diagram showing ultra-low pass (ULP) whole genome sequencing and ichor analyses.

[0125] FIG. 21 provides plots showing copy ratio as a function of chromosome number and tumor fraction from a healthy subject (top plot), and a newly diagnosed patient with cHL (033) (pre-treatment [middle] and on-treatment [bottom]). Note the disappearance of the 9p gain and additional copy number alterations following treatment.

[0126] FIG. 22 provides a schematic showing an exemplary treatment scheme (N/ICE clinical trial schema) performed in accordance with one or more aspects of the present disclosure. This schema provides an overview of the N/ICE clinical trial. Circulating tumor DNA was collected from patients participating in the N/ICE clinical trial.

[0127] FIG. 23 provides a diagram describing an analylitical and computational pipeline for analyzing ctDNA samples according to the methods of the disclosure. The diagram shows how the targeted sequencing panel can be used to characterize a plasma cfDNA sample in a method involving library synthesis, targeted sequencing, and computational analysis. FIG. 23 also provides a list of the programs used to analyze alterations in ctDNA samples.

[0128] FIGS. 24A and 24B provide a CoMut plot and a plot of molecular tumor burden (MTB) over time. FIG. 24A provides a CoMut plot of alterations detected by targeted sequencing of serial ctDNA samples from representative N/ICE trial patients (trial schema in FIG. 22). Samples are plotted along the x axis (week 1 day 1 [W1D1]-week 5 D1 [W5D1] of treatment with single agent nivo (N) and cycle 1 D1 [C1D1]-C2D21 of treatment with N/ICE [in patients with SD or PD at the first response assessment]). Genes/loci are plotted on the y axis. The shading of each tile reflects the kind of variant detected, including SNVs, INDELs, Copy Number Alterations, Structural Variants, and EBV status. FIG. 24B provides a plot of molecular tumor burden (MTB) over time (log scale) in representative N/ICE clinical trial patients. MTB at baseline for these patients: 006—226.5+/−29.9; 009—210.5+/−40.1; 015—849.8+/−340.6; 017—2448.3+/−825.4 HgE/ml (human genome equivalents per ml).

### DETAILED DESCRIPTION OF THE INVENTION

[0129] The invention provides compositions and methods of characterizing classical Hodgkin's Lymphoma (cHL), primary mediastinal B-cell lymphoma (PMBL), or a related lymphoid malignancy in a biological sample comprising circulating tumor DNA (ctDNA) of a subject.

[0130] The invention is based, at least in part, on the discovery that cHL and/or PMBL are characterized in ctDNA by detecting one or more of the following alterations: a non-synonymous mutation in a polynucleotide(s) encoding one or more of ACTbeta, ADGRG6, ARID1A, B2M, CSF2RB, DNAH12, EEF1A1, EZH2, GNA13, HLA-B, HIST2H2BE, HIST1H1E, IGLL5, IKBKB, IRF2BP2, IKZF3, IL4R, NFKBIA, NFKBIE, RBM38, SOCS1, STAT6, TNFAIP3, TP53, XPO1 ZNF217, or any combination thereof; a structural variation in a polynucleotide encoding a polypeptide(s) selected from one or more of CIITA, ETV6, PD-L1, PD-L2, or any combination thereof; and/or a copy number loss or gain in a chromosomal locus selected from one or more of 2p, 2p15, 2q. 2p16.1, 5p, 5q, 5p15.33, 6p21.33, 7p, 7q, 9p, 9q, 9p24.1, 1p36.32, 1q41, 6p21.32, 6q, 6q12, 6q23.3, 15q15.3, 16p13.3, 18q22.2, 21q, 22q13.2, or any combination thereof. Such alterations are detected, for example, using a set of SNP probes (alternatively, “baits”) that tile portions of the afore mentioned genes and chromosomes.

[0131] In embodiments disclosed herein include methods of detecting, diagnosing, selecting for treatment, treating, and monitoring the presence, absence, and/or progress of cHL and/or PMBL in a subject using ctDNA isolated from a biological sample from a subject. One or more embodiments comprise a custom targeted sequencing panel that includes recurrently mutated genes, somatic copy number alterations, and structural variants in cHL and the related lymphoid malignancy, PMBL. In various aspects, the sequencing panel also captures microsatellite loci for microsatellite instability scoring and passenger regions for TMB analysis and covers the major EBV strains. With this targeted sequencing platform, we have established a highly sensitive “off-the-shelf” circulating tumor DNA (ctDNA) assay for analyses of changes in molecular tumor burden and genetic features of response and resistance to checkpoint blockade or chemoimmunotherapy in cHL and the related lymphoid malignancy, PMBL. In various embodiments, the methods of the disclosure provide for a robust and quantitative circulating tumor DNA (ctDNA) assay for the analysis of molecular tumor burden (MTB) and/or recurrent molecular alterations in a subject with classical Hodgkin lymphoma (cHL) or primary mediastinal B-cell lymphoma (PMBL). In some cases, the methods allow for the identification of molecular alterations in ctDNA, either prior to or during treatment for cHL or PMBL.

Classical Hodgkin's Lymphoma (CHL or cHL)

[0132] CHL, which is most commonly a disease of adolescents and young adults, affects almost 10,000 patients per year in the United States. In newly diagnosed patients, the intensity and duration of frontline therapy are based upon a combination of clinical risk factors and the rapidity of radiographic response to treatment (Connors J M, et al. Hodgkin lymphoma. Nat Rev Dis Primers. 2020; 6(1):61. Epub 2020/07/25. doi: 10.1038/s41572-020-0189-6. PubMed PMID: 32703953). Although most patients are cured with empiric combination chemotherapy, over 25% will relapse from or be refractory to initial induction therapy. Current approaches to subsequent treatment include empiric salvage chemotherapy followed by autologous stem cell transplantation in chemosensitive patients or targeted agents based on new insights into the biology and genetics of cHL.

[0133] CHL is composed of rare malignant Hodgkin Reed Stenberg (HRS) cells within an extensive, inflammatory/immune cell infiltrate. HRS cells are derived from crippled pre-apoptotic germinal center (GC) B-cells that lack functional B-cell receptors (BCRs) and have reduced expression of key B-cell transcription factors. These tumor cells rely on alternative signaling and survival pathways, including JAK/STAT and nuclear factor kB (NFkB), and exhibit genetic alterations of these pathway components.

[0134] In ˜30% of cHLs in North America and Europe, the malignant Hodgkin Reed Sternberg (HRS) cells have evidence of latent Epstein-Barr virus (EBV) infection and associated expression of latent membrane protein 1 (LMP1) and latent membrane protein 2A (LMP2A). In EBV⁺ tumors, LMP1 mimics an active CD40 receptor and provides an alternative mechanism for enhanced NFkB signaling. LMP2A facilitates BCR-like signaling via a cytoplasmic motif that resembles the BCR immunoreceptor tyrosine-based activation sequence.

[0135] The paucity of malignant Hodgkin Reed Sternberg (HRS) cells (1-2%) in primary cHLs has limited comprehensive genomic characterization of these tumors. Using a combination of high-density single nucleotide polymorphism (SNP) array analyses of cell lines, laser-capture microdissection and genetic evaluation of primary HRS cells and fluorescence in situ hybridization (FISH) of primary tumors, recurrent copy gains of chromosome 9p/9p24/PD-L1 (CD274)/PD-L2 (PDCD1LG2) and associated overexpression of these PD-1 ligands in cHL have been identified. The 9p24.1 amplicon also includes JAK2, which further augments JAK/STAT signaling and PD-1 ligand expression.

[0136] These findings provided a genetic rationale for evaluating PD-1 blockade in patients with cHL and underscored the importance of defining recurrent somatic copy number alterations (SCNAs) in this disease. Patients with multiply relapsed/refractory (R/R) cHL had overall response rates of ˜70% to PD-1 blockade, among the highest reported response rates for any tumor type. In the registration trial of nivolumab (anti PD-1), patients with high-level 9p24.1 gains and increased HRS cell expression of PD-L1 had more favorable responses to PD-1 blockade. PD-1 blockade is currently being evaluated in earlier treatment settings including first relapse and frontline therapy of cHL. However, previous described fluorescence in situ hybridization (FISH) assays of 9p24.1 alterations cannot scale to large clinical trials or capture alternative mechanisms of JAK/STAT signaling and additional genetic events that may influence response to PD-1 blockade.

[0137] Mechanisms of enhanced JAK/STAT signaling beyond p9/9p24.1 gain have been characterized, including activating STAT6 mutations and inactivating SOCS1 and PTPN mutations and other potential events such as CSFR2B mutations, 9q22.2/SOCS1 copy loss and altered XPO1-dependent STAT6 transport (FIG. 1). More generally, focal SCNAs are alternative mechanisms for perturbing oncogenic drivers or tumor suppressors (i.e., 2p15/XPO1 copy gains or activating XPO1 mutations and 6q23.3/TNFAIP3 copy loss or inactivating TNFAIP3 mutations). Recurrent SVs are additional bases of immune evasion in cHL (i.e., CIITA SVs) (FIG. 1). These findings highlighted the advantages of capturing all 3 types of genetic alterations—mutations, SCNAs and SVs—in the methods of the disclosure.

[0138] It has been shown that cHLs have a median of 11 recurrent genetic drivers, which prompted further analysis of co-occurring alterations in primary tumors and cell lines. Although a majority of HRS cell samples in a study exhibited 2p/2p15 and 9p/9p24 copy gain, 6q/6q23.3 copy loss and SOCS1 somatic mutations, 2-way hierarchical clustering revealed additional genetic substructure associated with EBV status (FIG. 2A). Notably, EBV⁻ tumors exhibited genetic bases of enhanced NFkB signaling (recurrent inactivating mutations or focal copy loss of TNFAIP3) that were not found in EBV⁺ cHLs (FIG. 2A). Additionally, EBV⁻ cHLs were significantly more likely to have genetic mechanisms of defective MHC class I expression (inactivating B2M or HLAB mutations or copy loss of 6p21.32/HLA-B) than EBV⁺ cHLs (FIG. 2A).

[0139] In studies, over 90% of cHLs from 2 large cohorts had decreased or undetectable HRS cell expression of MHC class I, suggesting that tumor antigen presentation to CD8⁺ T cells does not play a major role in the response to PD-1 blockade in this disease. Fewer cHLs exhibited MHCII copy loss and decreased HRS cell surface expression of MHC class II. Patients with MHC class II⁺ (but not MHC class I⁺) cHLs had more favorable responses to PD-1 blockade, implicating CD4⁺ T-cell mediated immune responses.

[0140] In previous studies, in comparison to other characterized lymphoid malignancies, EBV⁻ cHLs exhibited an unexpectedly high incidence (˜14%) of microsatellite instability (MSI). Additionally, EBV⁻ cHLs had among the highest reported tumor mutational burdens (TMB), similar to those of carcinogen-induced tumors. The high TMBs and MSI incidence in EBV⁻ cHLs and the JAK/STAT pathway alterations in both EBV⁻ and EBV⁺ cHLs are additional potential mechanisms for the sensitivity of these tumors to PD-1 blockade, beyond 9p/9p24.1 CNAs. Moreover, the pervasive genetic alterations of MHC Class I antigen presentation pathway components in EBV⁻ cHLs and the prognostic significance of an intact MHC class II pathway highlight the importance of the methods of the disclosure to comprehensively assess alterations in the MHC class I and II pathways and EBV status.

### Primary Mediastinal B-Cell Lymphomas (PMBLs)

[0141] PMBLs are aggressive non-Hodgkin lymphomas that typically present as large mediastinal masses in young women. These tumors share molecular and clinical features with cHLs, including: 1) constitutive activation of NFkB and JAK/STAT signaling; 2) genetic bases of MHC class I loss and PD-1 mediated immune evasion, including recurrent 9p24.1 copy gain (FIG. 2B); and 3) demonstrated sensitivity to PD-1 blockade. In PMBL, as in cHL, additional molecular features have been identified, as described in the Examples provided herein, that may increase sensitivity to PD-1 blockade, including high TMB burden and MSI.

Characterization of Classical Hodgkin's Lymphoma and/or Primary Mediastinal B-Cell Lymphoma

[0142] The methods and compositions described herein relate to compositions and methods for characterizing classical Hodgkin's Lymphoma (cHL) and/or primary mediastinal B-cell lymphoma (PMBL) in circulating tumor DNA (ctDNA), such as that present in cell free DNA (cfDNA). Such characterization includes the identification and evaluation of classical Hodgkin's Lymphoma (cHL) and/or primary mediastinal B-cell lymphoma (PMBL) for non-synonymous mutations, somatic copy number alterations (SCNAs), and structural variants (SVs), including identification of variation across cancer causing genes (CCGs). In particular embodiments, the disclosure provides for characterization of a cHL through the detection and characterization of (i) a non-synonymous mutation in a polynucleotide(s) encoding a polypeptide selected from one or more of ACTbeta, ADGRG6, ARID1A, B2M, CSF2RB, DNAH12, EEF1A1, GNA13, HLA-B, IGLL5, IKBKB, NFKBIA, NFKBIE, RBM38, SOCS1, STAT6, TNFAIP3, and XPO1; (ii) a structural variation in a polynucleotide(s) encoding one or more of CIITA, ETV6, and combinations thereof; and/or (iii) a copy number variation in a chromosomal locus selected from one or more of 2p, 2p15, 5p, 5q, 5p15.33, 9p, 9p24.1, 1p36.32, 1q41, 6p21.32, 6q, 6q12, 6q23.3, 18q22.2, and various combinations thereof. In some embodiments, the disclosure provides for the characterization of a PMBL through the detection and characterization of (i) a non-synonymous mutation in a polynucleotide encoding a polypeptide selected from one or more of B2M, CSF2RB, EZH2, GNA13, HIST2H2BE, HIST1H1E, IRF2BP2, IKZF3, IL4R, PAX5, STAT6, TP53, TNFAIP3, XPO1, ZNF217, and various combinations thereof; (ii) a structural variation in a polynucleotide encoding a polypeptide selected from one or more of CIITA, PD-L1, PD-L2, and various combinations thereof; and/or (iii) a copy number variation in a chromosomal locus selected from one or more of 2p, 2q. 2p16.1, 5p, 5q, 7p, 9p24.1, 9p, 9q, 6p21.33, 6q23.3, 7q, 15q15.3, 16p13.3, 19q13.32, 21q, 22q13.2, and various combinations thereof. The methods disclosed herein feature a method of characterizing cHL and/or PMBL in a biological sample of a subject.

[0143] In some embodiments, a biological sample of a subject containing ctDNA is characterized to detect alterations (e.g., non-synonymous mutations, copy number gains, copy number losses, or structural variations). In some embodiments, the alteration is e.g., a non-synonymous mutation in a polynucleotide encoding one or more of ACTbeta, ADGRG6, ARID1A, B2M, CSF2RB, DNAH12, EEF1A1, EZH2, GNA13, HLA-B, HIST2H2BE, HIST1H1E, IGLL5, IKBKB, IRF2BP2, IKZF3, IL4R, NFKBIA, NFKBIE, RBM38, SOCS1, STAT6, TNFAIP3, TP53, XPO1 and/or ZNF217; or a copy number loss or gain in a chromosomal locus selected from one or more of 2p, 2p15, 2q. 2p16.1, 5p, 5q, 5p15.33, 6p21.33, 7p, 7q, 9p, 9q, 9p24.1, 1p36.32, 1q41, 6p21.32, 6q, 6q12, 6q23.3, 15q15.3, 16p13.3, 18q22.2, 21q, and/or 22q13.2. In some embodiments, such characterization is used to select a subject for treatment with an agent described herein (e.g., JAK/Stat inhibitor, PD-1 blockade). Thus the methods described herein include methods for the treatment of cancer, particularly cHL and/or PMBL.

[0144] In some embodiments, the methods involve tiling a candidate cancer gene with a probe directed to a polynucleotide sequence encoding ACTbeta, ADGRG6, ARID1A, B2M, CIITA, CSF2RB, DNAH12, EEF1A1, ETV6, EZH2, GNA13, HLA-B, HIST2H2BE, HIST1H1E, JAK2, IGLL5, IKBKB, IRF2BP2, IKZF3, IL4R, NFKBIA, NFKBIE, RBM38, SOCS1, PD-L1, PD-L2, REL, SOCS6, STAT6, TNFAIP3, TP53, XPO1, and/or ZNF217. In some embodiments, the methods involve generating a probe to detect a copy number alteration in a chromosomal locus (e.g., 2p, 2p15, 2q. 2p16.1, 5p, 5q, 5p15.33, 6p21.33, 7p, 7q, 9p, 9q, 9p24.1, 1p36.32, 1q41, 6p21.32, 6q, 6q12, 6q23.3, 15q15.3, 16p13.3, 18q22.2, 21q, and 22q13.2). In some embodiments, the probes detect a single nucleotide polymorphism (SNP). Exemplary probes are about, at least about, and/or no more than about 50, 75, 100, 105, 110, 115, 120, 130, 140, 150, 160, 170, 180, 190, or 200 nucleotides in length. In some embodiments, a the probes are 120 bp in length. In some embodiments, the probes hybridize at a density of ˜1 probe every 50, 75, 100, 150, 200, 250, 300, 400, 500, 1000, 1100, 1200, 1300, 1400, 1500, or 2000 kb. In some embodiments, the probes hybridize at a density of about, at least about, or no more than about 1, 2, 3, 4, 5, 6, 7, 8, 9, or 10 probes every about 1 kb, 10 kb, 100 kb, 200 kb, 300 kb, 400 kb, 500 kb, 600 kb, 700 kb, 800 kb, 900 kb, or 1000 kb, and, in some embodiments, also no less than about or at least about 1, 2, 3, 4, 5, 6, 7, 8, 9, 10, 11, 12, 13, 14, 15, 20, 25, 30, 35, 40, 45, or 50 probes per polynucleotide sequence and/or chromosomal locus.

[0145] In some embodiments, the methods involve isolating ctDNA or fragments thereof from a biological sample of the subject; constructing a library containing the ctDNA or fragments; sequencing the library (e.g., using ULP-WGBS to about 0.1× genome or exome-wide sequencing coverage) and detecting alterations in at least one of ACTbeta, ADGRG6, ARID1A, B2M, CIITA, CSF2RB, DNAH12, EEF1A1, ETV6, EZH2, GNA13, HLA-B, HIST2H2BE, HIST1H1E, JAK2, IGLL5, IKBKB, IRF2BP2, IKZF3, IL4R, NFKBIA, NFKBIE, RBM38, SOCS1, PD-L1, PD-L2, REL, SOCS6, STAT6, TNFAIP3, TP53, XPO1, and ZNF217, and/or at a chromosomal locus selected from one or more of 2p, 2p15, 2q. 2p16.1, 5p, 5q, 5p15.33, 6p21.33, 7p, 7q, 9p, 9q, 9p24.1, 1p36.32, 1q41, 6p21.32, 6q, 6q12, 6q23.3, 15q15.3, 16p13.3, 18q22.2, 21q, 22q13.2, or any combination thereof.

[0146] In some embodiments, a ctDNA displays alterations compared to a reference polynucleotide (e.g., cfDNA or genomic DNA from a healthy subject or representative group of subjects). Accordingly, this disclosure provides methods for detecting, diagnosing, or characterizing a cHL or PMBL in a subject involving the use, for example, of oligonucleotide probes (“baits”). Representative probe sequences are listed in Tables 1 and 2 and are provided in the sequence listing as SEQ ID NOs: 1-1502.

[0147] In some instances, the methods of the disclosure involve detecting the presence or absence of an Epstein-Barr virus (EBV) in a sample. Non-limiting examples of probes suitable for use in detection of EBV are listed in Table 2 and are provided in the Sequence Listing as SEQ ID NOs: 1431-1502. In embodiments, the EBV is selected from one or more of Human gammaherpesvirus 4 (NCBI Ref. Seq. Accession No. NC_007605.1), Human herpesvirus 4 strain GD1 (GenBank Accession No. AY961628.3), Human herpesvirus 4 strain GD2 (GenBank Accession No. HQ020558.1), Human herpesvirus 4 strain HKNPC1 (GenBank Accession No. JQ009376.2), Human herpesvirus 4 strain AG876 (GenBank Accession No. DQ279927.1), and Epstein-Barr virus (EBV) genome, strain B95-8 (GenBank Accession No. V01555.2). The EBV virus(es) can be detected using probes that target a polynucleotide sequence(s) encoding an LMP1 and/or EBNA1 polynucleotide.

[0148] In some cases, the methods of the disclosure also involve characterizing microsatellite stability by detecting an alteration in a microsatellite locus selected from one or more of MSH2, MSH3, MSH6, MLH1, EXO1, PMS2, POLD1, and POLE.

[0149] In one approach, standard methods are used to detect changes in DNA sequence, copy number, or structural variation in a biological sample relative to a reference (e.g., a reference determined by an algorithm, determined based on known values, determined using a standard curve, determined using statistical modeling, or level present in a control polynucleotide, genome or exome).

[0150] Methods of the invention are useful as clinical or companion diagnostics for therapies or can be used to guide treatment decisions based on clinical response/resistance. In other embodiments, methods of the invention can be used to qualify a sample for whole-exome sequencing.

[0151] A physician may diagnose a subject and the physician thus has the option to recommend and/or refer the subject to seek the confirmation/treatment of the disease. The availability of high throughput sequencing technology allows the diagnosis of large number of subjects.

### Types of Samples

[0152] This invention provides methods to extract and sequence a polynucleotide present in a sample. In one embodiment, the samples are biological samples generally derived from a subject (e.g., mammal, such as a human), preferably as a bodily fluid (such as ascites, blood, plasma, pleural fluid, serum, cerebrospinal fluid, phlegm, saliva, stool, urine, semen, prostate fluid, breast milk, or tears), or tissue sample (e.g. biopsy (e.g., needle biopsy), primary tumor sample, tissue section). In still another embodiment, the samples are biological samples from in vitro sources (e.g., cell culture medium). In an embodiment, the biological sample is plasma containing cell free (cfDNA) or circulating tumor DNA (ctDNA)

[0153] In embodiments, a liquid sample (e.g., blood, plasma, serum) comprises at least about and/or less than about 1 μl, 10 μl, 100 μl, 200 μl, 300 μl, 400 μl, 500 μl, 600 μl, 700 μl, 800 μl, 900 μl, 1 ml, 2 ml, 3 ml, 4 ml, 5 ml, 6 ml, 7 ml, 8 ml, 9 ml, 10 ml, or 15 ml. In embodiments, a sample comprises at least about and/or less than about 1 mg, 10 mg, 100 mg, 200 mg, 300 mg, 400 mg, 500 mg, 600 mg, 700 mg, 800 mg, 900 mg, 1 g, 2 g, 3 g, 4 g, 5 g, 6 g, 7 g, 8 g, 9 g, 10 g, or 15 g. In various cases, the methods provided herein can be completed successfully using any of the above-listed sample volumes and/or masses.

### Reference Sequences

[0154] In certain aspects, the disclosure provides methods and kits that provide for the assessment of the presence or absence of one or more sequence variants and/or mutations (e.g., structural variants including translocations (SVs), somatic copy number alterations (SCNAs) and recurrent mutations) in a circulating tumor DNA (ctDNA) in a biological sample of a subject having or at risk of developing classical Hodgkin's Lymphoma (cHL) and/or primary mediastinal B-cell lymphoma (PMBL) as compared to a corresponding reference sequence. Non-limiting examples of reference sequences include polynucleotide samples (e.g., cell free DNA) from a healthy subject or from a group of healthy subjects (e.g., a panel of normals (PoN)). In particular embodiments, a subject, tissue, cell and/or sample is assessed for one or more alterations and/or sites of copy number alterations in ctDNA. Such alterations include:
[0155] 1.) Mutations (single nucleotide variants, insertions, deletions);
[0156] 2.) Copy Number (CN) alterations (CN gain, amplifications, CN losses, Deletions);
[0157] 3.) Structural variants (chromosomal translocations, inversions, tandem duplications, etc.); and
[0158] 4.) Mutational Signatures.

[0159] In some instances, the alteration types used for characterization include structural variants including translocations (SVs), somatic copy number alterations (SCNAs) and mutations. In some embodiments, the alteration is a non-synonymous mutation in a polynucleotide(s) encoding one or more of ACTbeta, ADGRG6, ARID1A, B2M, CSF2RB, DNAH12, EEF1A1, EZH2, GNA13, HLA-B, HIST2H2BE, HIST1H1E, IGLL5, IKBKB, IRF2BP2, IKZF3, IL4R, NFKBIA, NFKBIE, RBM38, SOCS1, STAT6, TNFAIP3, TP53, XPO1 and ZNF217; a structural variation in a polynucleotide encoding a polypeptide(s) selected from one or more of CIITA, ETV6, PD-L1, and PD-L2; and/or a copy number loss or gain in a chromosomal locus selected from one or more of 2p, 2p15, 2q. 2p16.1, 5p, 5q, 5p15.33, 6p21.33, 7p, 7q, 9p, 9q, 9p24.1, 1p36.32, 1q41, 6p21.32, 6q, 6q12, 623.3, 15q15.3, 16p13.3, 18q22.2, 21q, and 22q13.2. In some cases a copy number variation is determined by characterizing a copy number variation in a polynucleotide encoding a polypeptide selected from one or more of HLA-B, JAK2, NFKBIE, PD-L1, PD-L2, REL, SOCS6, TNFAIP3, and XPO1.

### Detection of Alterations

[0160] In some aspects, an alteration (e.g., a non-synonymous mutation in a polynucleotide(s) encoding one or more of ACTbeta, ADGRG6, ARID1A, B2M, CIITA, CSF2RB, DNAH12, EEF1A1, ETV6, EZH2, GNA13, HLA-B, HIST2H2BE, HIST1H1E, JAK2, IGLL5, IKBKB, IRF2BP2, IKZF3, IL4R, NFKBIA, NFKBIE, RBM38, SOCS1, PD-L1, PD-L2, REL, SOCS6, STAT6, TNFAIP3, TP53, XPO1, and ZNF217, and/or at a chromosomal locus selected from one or more of 2p, 2p15, 2q. 2p16.1, 5p, 5q, 5p15.33, 6p21.33, 7p, 7q, 9p, 9q, 9p24.1, 1p36.32, 1q41, 6p21.32, 6q, 6q12, 6q23.3, 15q15.3, 16p13.3, 18q22.2, 21q, and 22q13.2) is detected using exome sequencing or probe-hybridization. Such detection method is performed upon a test sample (e.g., a biological sample containing ctDNA) for the purpose of characterizing cHL or PMBL in the subject, for example, by detecting variants and/or copy number variation as described herein and selecting a therapy. In certain embodiments, assessment of candidate and/or test samples can be performed using one or more amplification and/or sequencing oligonucleotides flanking the above-referenced variant sequence and/or copy number variation regions. The assessment can also be performed based upon binding of a labeled bait(s) (e.g., an oligonucleotide(s)) to a target sequence in the sample. Design and use of such amplification and sequencing oligonucleotides, and/or copy number detection probes/oligonucleotides (e.g., baits), can be performed by one of ordinary skill in the art. The detection can involve using baits to target particular sequences from a sample for subsequent sequencing.

[0161] As will be appreciated by one of ordinary skill in the art, any such amplification sequencing and/or copy number detection oligonucleotides can be modified by any of a number of art-recognized moieties and/or exogenous sequences, e.g., to enhance the processes of amplification, sequencing reactions and/or detection. Exemplary oligonucleotide modifications that are expressly contemplated for use with the oligonucleotides of the instant disclosure include, e.g., fluorescent and/or radioactive label modifications; labeling one or more oligonucleotides with a universal amplification sequence (optionally of exogenous origin) and/or labeling one or more oligonucleotides of the instant disclosure with a unique identification sequence (e.g., a “bar-code” sequence, optionally of exogenous origin), as well as other modifications known in the art and suitable for use with oligonucleotides.

[0162] In embodiments, the polynucleotides (e.g., baits, probes, or oligonucleotides) provided herein (e.g., baits, probes, or oligonucleotides) contain one or more modifications or analogs.

[0163] For example, in some embodiments a polynucleotide contains one or more analogs (e.g., altered backbone, sugar, or nucleobase). Some non-limiting examples of analogs include 5-bromouracil, peptide nucleic acid, xeno nucleic acid, morpholinos, locked nucleic acids, glycol nucleic acids, threose nucleic acids, dideoxynucleotides, cordycepin, 7-deaza-GTP, fluorophores (e.g., rhodamine or fluorescein linked to the sugar), thiol containing nucleotides, biotin linked nucleotides, fluorescent base analogs, CpG islands, methyl-7-guanosine, methylated nucleotides, inosine, thiouridine, pseudouridine, dihydrouridine, queuosine, and wyosine.

[0164] In embodiments, the polynucleotide contains a modified backbone and/or linkages (e.g., between adjacent nucleosides). Non-limiting examples of modified backbones include those that contain a phosphorus atom in the backbone and those that do not contain a phosphorus atom in the backbone. Non-limiting examples of modified backbones include phosphorothioates, chiral phosphorothioates, phosphorodithioates, phosphotriesters, aminoalkyl phosphotriesters, methyl and other alkyl phosphonate such as 3′-alkylene phosphonates, 5′-alkylene phosphonates, chiral phosphonates, phosphinates, phosphoramidates including 3′-amino phosphoramidate and aminoalkyl phosphoramidates, phosphorodiamidates, thionophosphoramidates, thionoalkylphosphonates, thionoalkylphosphotriesters, selenophosphates, and boranophosphates having normal 3′-5′ linkages, 2′-5′ linked analogs, and those having inverted polarity wherein one or more internucleotide linkages is a 3′ to 3′, a 5′ to 5′ or a 2′ to 2′ linkage.

[0165] In embodiments, a polynucleotide contains short chain alkyl or cycloalkyl linkages (e.g., between adjacent nucleosides), mixed heteroatom and alkyl or cycloalkyl internucleoside linkages, or one or more short chain heteroatomic or heterocyclic internucleoside linkages. In embodiments, a polynucleotide includes one or more of the following: morpholino linkages (formed in part from the sugar portion of a nucleoside); siloxane backbones; sulfide, sulfoxide and sulfone backbones; formacetyl and thioformacetyl backbones; methylene formacetyl and thioformacetyl backbones; riboacetyl backbones; alkene containing backbones; sulfamate backbones; methyleneimino and methylenehydrazino backbones; sulfonate and sulfonamide backbones; amide backbones; and others having mixed N, O, S and CH₂ component parts.

[0166] In embodiments, a polynucleotide contains a nucleic acid mimetic. The term “mimetic” can be intended to include polynucleotides wherein only the furanose ring or both the furanose ring and the internucleotide linkage are replaced with non-furanose groups, replacement of only the furanose ring can also be referred as being a sugar surrogate. The heterocyclic base moiety or a modified heterocyclic base moiety can be maintained for hybridization with an appropriate target nucleic acid. One such nucleic acid can be a peptide nucleic acid (PNA). In a PNA, the sugar-backbone of a polynucleotide can be replaced with an amide containing backbone, in particular an aminoethylglycine backbone. The nucleotides can be retained and are bound directly or indirectly to aza nitrogen atoms of the amide portion of the backbone. In embodiments, the backbone in PNA compounds contains two or more linked aminoethylglycine units that give PNA an amide containing backbone. Heterocyclic base moieties can be bound directly or indirectly to aza nitrogen atoms of the amide portion of the backbone.

[0167] In embodiments, a polynucleotide contains a morpholino backbone structure. For example, a nucleic acid can contain a 6-membered morpholino ring in place of a ribose ring. In some of these embodiments, a phosphorodiamidate or other non-phosphodiester internucleoside linkage can replace a phosphodiester linkage.

[0168] A polynucleotide can contain linked morpholino units having heterocyclic bases attached to the morpholino ring. Linking groups can link morpholino monomeric units. Non-ionic morpholino-based oligomeric compounds can have less undesired interactions with cellular proteins. Morpholino-based polynucleotides can be nonionic mimics of nucleic acids. A variety of compounds within the morpholino class can be joined using different linking groups. A further class of polynucleotide mimetic can be referred to as cyclohexenyl nucleic acids (CeNA). In some instances, the furanose ring normally present in a nucleic acid molecule is replaced with a cyclohexenyl ring. CeNA DMT protected phosphoramidite monomers can be prepared and used for oligomeric compound synthesis using phosphoramidite chemistry. In some cases, incorporation of CeNA monomers into a nucleic acid chain increases the stability of a DNA/RNA hybrid. CeNA oligoadenylates can form complexes with nucleic acid complements with similar stability to the native complexes. In embodiments, a polynucleotide contains Locked Nucleic Acids (LNAs) in which the 2′-hydroxyl group is linked to the 4′ carbon atom of the sugar ring thereby forming a 2′-C, 4′-C-oxymethylene linkage, thereby forming a bicyclic sugar moiety. The linkage can be a methylene (—CH₂), group bridging the 2′ oxygen atom and the 4′ carbon atom wherein n is 1 or 2. LNA and LNA analogs can display very high duplex thermal stabilities with complementary nucleic acid (Tₘ=+3 to +10° C.), stability towards 3′-exonucleolytic degradation and good solubility properties.

[0169] In embodiments, a polynucleotide contains nucleobase modifications (often referred to simply as “base modifications”) or substitutions. In embodiments, unmodified nucleobases include one or more of the purine bases, (e.g., adenine (A) and guanine (G)), and/or the pyrimidine bases, (e.g., thymine (T), cytosine (C) and uracil (U)). Non-limiting examples of modified nucleobases include nucleobases such as 5-methylcytosine (5-me-C), 5-hydroxymethyl cytosine, xanthine, hypoxanthine, 2-aminoadenine, 6-methyl and other alkyl derivatives of adenine and guanine, 2-propyl and other alkyl derivatives of adenine and guanine, 2-thiouracil, 2-thiothymine and 2-thiocytosine, 5-halouracil and cytosine, 5-propynyl (—C═C—CH3) uracil and cytosine and other alkynyl derivatives of pyrimidine bases, 6-azo uracil, cytosine and thymine, 5-uracil (pseudouracil), 4-thiouracil, 8-halo, 8-amino, 8-thiol, 8-thioalkyl, 8-hydroxyl and other 8-substituted adenines and guanines, 5-halo particularly 5-bromo, 5-trifluoromethyl and other 5-substituted uracils and cytosines, 7-methylguanine and 7-methyladenine, 2-F-adenine, 2-aminoadenine, 8-azaguanine and 8-azaadenine, 7-deazaguanine and 7-deazaadenine and 3-deazaguanine and 3-deazaadenine. Further non-limiting examples of modified nucleobases include tricyclic pyrimidines such as phenoxazine cytidine(1H-pyrimido(5,4-b)(1,4)benzoxazin-2(3H)-one), phenothiazine cytidine (1H-pyrimido(5,4-b)(1,4)benzothiazin-2(3H)-one), G-clamps such as a substituted phenoxazine cytidine (e.g., 9-(2-aminoethoxy)-H-pyrimido(5,4-(b) (1,4)benzoxazin-2(3H)-one), phenothiazine cytidine (1H-pyrimido(5,4-b)(1,4)benzothiazin-2(3H)-one), G-clamps such as a substituted phenoxazine cytidine (e.g., 9-(2-aminoethoxy)-H-pyrimido(5,4-(b) (1,4)benzoxazin-2(3H)-one), carbazole cytidine (2H-pyrimido(4, -b)indol-2-one), pyridoindole cytidine (H-pyrido(3′,2′:4, 5)pyrrolo[2,3-d]pyrimidin-2-one).

[0170] In aspects of the invention, a sample is analyzed by means of a biochip (also known as a microarray) containing targeted baits (oligonucleotides specific for a target alteration). Targeted baits specific for target alterations (e.g., select SV, SCNAs, and mutations) are useful as hybridizable array elements in a biochip. Biochips generally comprise solid substrates and have a generally planar surface, to which a capture reagent (also called an adsorbent or affinity reagent) is attached. Frequently, the surface of a biochip comprises a plurality of addressable locations, each of which has the capture reagent bound there.

[0171] The array elements are organized in an ordered fashion such that each element is present at a specified location on the substrate. Useful substrate materials include membranes, composed of paper, nylon or other materials, filters, chips, glass slides, and other solid supports. The ordered arrangement of the array elements allows hybridization patterns and intensities to be interpreted as expression levels of particular genes or proteins. Methods for making nucleic acid microarrays are known to the skilled artisan and are described, for example, in U.S. Pat. No. 5,837,832, Lockhart, et al. (Nat. Biotech. 14:1675-1680, 1996), and Schena, et al. (Proc. Natl. Acad. Sci. 93:10614-10619, 1996), herein incorporated by reference. Methods for making polypeptide microarrays are described, for example, by Ge (Nucleic Acids Res. 28: e3. i-e3. vii, 2000), MacBeath et al., (Science 289:1760-1763, 2000), Zhu et al. (Nature Genet. 26:283-289), and in U.S. Pat. No. 6,436,665, hereby incorporated by reference.

[0172] In aspects of the invention, a sample is analyzed by means of a nucleic acid biochip (also known as a nucleic acid microarray). To produce a nucleic acid biochip, oligonucleotides may be synthesized or bound to the surface of a substrate using a chemical coupling procedure and an ink jet application apparatus, as described in PCT application WO95/251116 (Baldeschweiler et al.). Alternatively, a gridded array may be used to arrange and link cDNA fragments or oligonucleotides to the surface of a substrate using a vacuum system, thermal, UV, mechanical or chemical bonding procedure.

### Bait Sets

[0173] Provided herein are bait sets (e.g., sets of oligonucleotide probes) for characterization of variants in a biological sample (e.g., a biological sample containing cell free DNA and/or circulating tumor DNA) and/or for detection of a virus (e.g., Epstein-Barr virus) in a sample. The bait sets can comprise part of a targeted sequencing panel. The bait sets can comprise oligonucleotide sequences targeting structural variants including translocations (SVs), somatic copy number alterations (SCNAs), and mutations. The bait sets can contain primer sequences allowing for targeted sequencing of a sample or for preparation of an amplicon(s) from a sample. In embodiments, the bait sets make up part of a targeted sequencing panel. Methods for design and manufacture of a targeted sequencing panel are known in the art (see, e.g., Moorthie, et al. “Review of massively parallel DNA sequencing technologies”, The HUGO Journal, 5:1-12 (2011)). The targeted sequencing panel can be hybridization capture-based, circularization-based, or amplicon sequencing-based. The bait sets can be used to prepare a biochip.

[0174] Table 1 of the Examples provides information relating to baits suitable for use in targeted sequencing according to methods of the present invention. The table provides SEQ ID NOs (i.e., SEQ ID NOs: 1-1430) for bait sequences that can be used to target the indicated variants or other alterations. For each bait, Table 1 lists the region of the indicated chromosome (p.chr) targeted by and/or complementary to the bait (i.e., the region spanning from p.start to p.stop).

[0175] Baits suitable for use in embodiments of the invention can include a set of polynucleotides selected from those listed in Table 1 and/or Table 2. The set of polynucleotides (i.e., bait set) can include all or a sub-set of polynucleotides identified as targeting a particular variant. The set of polynucleotides can include all or a sub-set of polynucleotides listed in Table 1 and/or Table 2. The set of polynucleotides can include polynucleotides complementary or identical to about or at least about 1%, 2%, 3%, 4%, 5%, 10%, 25%, 50%, 75%, 80%, 85%, 90%, 95%, or 100% of regions collectively defined/targeted by a set of polynucleotides listed in Table 1 and/or Table 2. The set of polynucleotides can include sequences having about or at least about 1%, 2%, 3%, 4%, 5%, 10%, 25%, 50%, 75%, 80%, 85%, 90%, 95%, or 100% sequence identity to sequences listed in Table 1 and/or Table 2. The sequence identity can be calculated across the full contiguous span of bases contained by a sequence(s) listed in Table 1 and/or Table 2, or across 1%, 2%, 3%, 4%, 5%, 10%, 25%, 50%, 75%, 80%, 85%, 90%, 95% of a contiguous span of bases contained by a sequence(s) listed in Table 1 and/or Table 2, or across about or at least about 5, 10, 15, 20, 25, 30, 35, 40, 45, 50, 55, 60, 65, 70 75, 80, 85, 90, 95, 100, 200, 300, 400, 500, or 1000 bp of a sequence(s) listed in Table 1 and/or Table 2. The polynucleotides in the set of polynucleotides can individually include sequences complementary or identical to at least 10, 20, 30, 40, 50, 60, 70, 80, 90, 100, 120, 150, 200, 300, or 500 contiguous, and optionally terminal, base pairs of a set of polynucleotides selected from those polynucleotides listed in Table 1 and/or Table 2. The polynucleotides in the set of polynucleotides can individually include contiguous sequences, optionally terminal sequences, that are complementary to chromosomal regions adjacent or proximal to (i.e., within about or at least about 10 bp, 50 bp, 100 bp, 500 bp, or 1000 bp of a terminal extent of a targeted region) those chromosomal/genomic regions targeted by sequences listed in Table 1 and/or Table 2, where the contiguous sequences can be about or at least about 5, 10, 15, 20, 25, 30, 35, 40, 45, 50, 55, 60, 65, 70 75, 80, 85, 90, 95, 100, 200, 300, 400, 500, or 1000 bp in length, and/or no more than about 5, 10, 15, 20, 25, 30, 35, 40, 45, 50, 55, 60, 65, 70 75, 80, 85, 90, 95, 100, 200, 300, 400, 500, or 1000 bp in length.

[0176] In embodiments, the bait sets include Epstein Barr virus (see sequences provided in Table 2 of the examples). Representative baits suitable for detection of Epstein Barr virus in a sample are provided in Table 2 and as SEQ ID NOs: 1431-1502 in the Sequence Listing. The bait sets can be used to determine tumor mutational burden in a subject or for quantifying levels of circulating tumor DNA in a subject.

### Library Construction

[0177] In some embodiments, library construction involves fragmenting (e.g., through shearing) an aliquot of DNA. In embodiments, the library is prepared using cell free DNA. In some instances the library is prepared using about, less than about, and/or at least about, 0.1 ng, 1 ng, 2 ng, 3 ng, 4 ng, 5 ng, 10 ng, 15 ng, 20 ng, 25 ng, 30 ng, 35 ng, 40 ng, 45 ng, 50 ng, 75 ng, 100 ng, 250 ng, 300 ng, 350 ng, 400 ng, 450 ng, 500 ng, 1,000 ng, or more of DNA. Shearing can be performed using techniques available to the skilled practitioner, such as acoustically using a Covaris focused-ultrasonicator. In some cases, the library is prepared using DNA fragments with an average size of about, at least about, and/or of no more than about 10 bp, 20 bp, 30 bp, 40 bp, 50 bp, 100 bp, 150 bp, 200 bp, 300 bp, 400 bp, 500 bp, or 1,000 bp. In some cases, for cfDNA (cell free DNA; e.g., circulating tumor DNA), no shearing is performed during library construction.

[0178] Library preparation can be performed using a commercially available kit. A non-limiting example of a kit suitable for library preparation includes that provided by KAPA Biosystems (KAPA HyperPrep Kit with Library Amplification product KK8504). The kit can be used in combination with adapters, such as IDT's duplex UMI adapters. In some instances, Unique 8-base dual index sequences embedded within the p5 and p7 primers (from IDT) are added during PCR. Enzymatic clean-ups can be performed using Beckman Coultier AMPure XP beads with elution volumes reduced to 30 μL to maximize library concentration.

[0179] Following library construction, library quantification can be performed any of a variety of suitable techniques, such as by using the Invitrogen Quant-It broad range dsDNA quantification assay kit (Thermo Scientific Catalog: Q33130) with a 1:200 PicoGreen dilution. Following quantification, each library can be normalized to a set concentration (e.g., 35 ng/μL), using Tris-HCl, 10 mM, pH 8.0. In some embodiments, all steps performed during the library construction process and library quantification process are performed on the Agilent Bravo liquid handling system.

### In-Solution Hybrid Selection for Targeted Sequencing

[0180] Targeted sequencing relies on specific oligonucleotides (i.e., probes/baits) that selectively hybridize (i.e., bait) to target sequences. In targeted sequencing, the oligonucleotide probes are used to select for sequences present in a sample that hybridize to the oligonucleotide probes, thereby enriching the sample for sequences of interest (i.e., those sequences that hybridize to the probes).

[0181] Hybridization between the polynucleotides and hybrid capture probes is conducted under any conditions in which the hybrid capture probes hybridize to target polynucleotides, but do not substantially hybridize to non-target polynucleotides. This can involve selection under high stringency conditions. Following hybridization, the polynucleotide/probe complexes are separated based on the presence of a binding member in each probe, and unbound polynucleotides are removed under appropriate wash conditions that remove the nonspecifically bound polynucleotides, but do not substantially remove polynucleotide probe complexes.

[0182] In one embodiment, targeted sequencing is carried out using methods including those described herein and those described in Gnirke, et al., Nature biotechnology 27:182-189, 2009, US patent publications No. US 2010/0029498, US 2013/0230857, US 2014/0200163, US 2014/0228223, and US 2015/0126377 and International Patent Publication No. WO 2009/099602, each of which is incorporated by reference in its entirety.

[0183] The methods provided herein can be used for enriching for target polynucleotides. The polynucleotides are associated with a genetic alteration of interest (e.g., SVs, SCNAs, or mutations). The polynucleotides can be enriched from a sample by about or at least about 2, 3, 4, 5, 6, 7, 8, 9, 10, 15, 20, 25, 30, 35, 40, 45, 50, 55, 60, 65, 70, 75, 80, 85, 90, 95, or 100-fold.

[0184] In embodiments, conditions (e.g., salt concentration and/or temperature) are adjusted such that hybridization between a target sequence and a hybridization probe(s), optionally bound to a solid support, occurs with precise complementary matches or with various degrees of less complementarity depending on the degree of stringency employed. For example, stringent salt concentration can include those containing less than about 750 mM NaCl and 75 mM trisodium citrate, less than about 500 mM NaCl and 50 mM trisodium citrate, or less than about 250 mM NaCl and 25 mM trisodium citrate. Low stringency hybridization can be achieved in the absence of organic solvent, e.g., formamide, while high stringency hybridization can be obtained in the presence of at least about 35% formamide, and most preferably at least about 50% formamide. Stringent temperature conditions can include temperatures of at least about 30° C., of at least about 37° C., or of at least about 42° C. Varying additional parameters, such as hybridization time, the concentration of detergent, e.g., sodium dodecyl sulfate (SDS), and the inclusion or exclusion of carrier DNA, are well known to those skilled in the art. Various levels of stringency are accomplished by combining these various conditions as needed.

[0185] In embodiments, after library construction, hybridization and capture are performed; for example, using a commercially available kit, such as IDT's XGen hybridization and wash kit following the manufacturer's suggested protocol, with some alterations. In some instances, a set of 12-plex pre-hybridization pools is created. These pre-hybridization pools can be created by equivolume pooling of the normalized libraries, Human Cot-1, and IDT XGen blocking oligos. In some cases, the pre-hybridization pools undergo lyophilization using the Biotage SPE-DRY. Post lyophilization, the targeted sequencing panel (TWIST Biosciences) along with hybridization mastermix can be added to the lyophilized pool prior to resuspension. In some embodiments, samples are incubated overnight. In various instances, library normalization and hybridization setup are performed using techniques available to the skilled practitioner, such as through the use of a Hamilton Starlet liquid handling platform. In some cases, target capture is also performed using techniques available to one of skill in the art, such as through the use of the Agilent Bravo automated platform. In some cases, post capture, a PCR is performed to amplify captured DNA.

### Preparation of Libraries for Cluster Amplification and Sequencing

[0186] In some cases, after post-capture enrichment, library pools are quantified using qPCR (automated assay on the Agilent Bravo), optionally using a kit from KAPA Biosystems with probes specific to the ends of the adapters. In embodiments, based on qPCR quantification, pools are normalized using a Hamilton Starlet to the required loading concentration. In various embodiments, up to about, at least about, and/or no more than about 1, 2, 3, 4, 5, 6, 7, 8, 9, 10, 15, 20, 24, 25, 30, 35, 40, 45, 50, 75, 100, or more samples are sequenced in parallel; for example, by being loaded into a device (e.g., a flowcell lane) for next generation sequencing (e.g., using Illumina's NovaSeq S4 sequencing technology).

### Cluster Amplification and Sequencing

[0187] In various embodiments, the methods of the disclosure involve cluster amplification of a DNA library. In some cases, cluster amplification of a library or library pools is performed according to methods available to the skilled practitioner, such as through the use of a kit. In some instances, libraries are sequenced using next generation sequencing, such as Sequencing-by-Synthesis chemistry for NovaSeq S4 flowcells. In embodiments, the sequencing involves producing sequence runs that are about, at least about, and/or no more than about 50, 100, 150, 151, 200, 250, 300, 350, 400, 450, or 500 bp in length, optionally where the runs can be paired runs.

[0188] In embodiments, incubation conditions are adjusted such that hybridization occurs with precise complementary matches or with various degrees of less complementarity depending on the degree of stringency employed. For example, stringent salt concentration will ordinarily be less than about 750 mM NaCl and 75 mM trisodium citrate, less than about 500 mM NaCl and 50 mM trisodium citrate, or less than about 250 mM NaCl and 25 mM trisodium citrate. Low stringency hybridization can be obtained in the absence of organic solvent, e.g., formamide, while high stringency hybridization can be obtained in the presence of at least about 35% formamide, and most preferably at least about 50% formamide. Stringent temperature conditions will ordinarily include temperatures of at least about 30° C., of at least about 37° C., or of at least about 42° C. Varying additional parameters, such as hybridization time, the concentration of detergent, e.g., sodium dodecyl sulfate (SDS), and the inclusion or exclusion of carrier DNA, are well known to those skilled in the art. Various levels of stringency are accomplished by combining these various conditions as needed. In a preferred embodiment, hybridization will occur at 30° C. in 750 mM NaCl, 75 mM trisodium citrate, and 1% SDS. In embodiments, hybridization will occur at 37° C. in 500 mM NaCl, 50 mM trisodium citrate, 1% SDS, 35% formamide, and 100 μg/ml denatured salmon sperm DNA (ssDNA). In other embodiments, hybridization will occur at 42° C. in 250 mM NaCl, 25 mM trisodium citrate, 1% SDS, 50% formamide, and 200 μg/ml ssDNA. Useful variations on these conditions will be readily apparent to those skilled in the art.

[0189] The removal of nonhybridized probes may be accomplished, for example, by washing. The washing steps that follow hybridization can also vary in stringency. Wash stringency conditions can be defined by salt concentration and by temperature. As above, wash stringency can be increased by decreasing salt concentration or by increasing temperature. For example, stringent salt concentration for the wash steps will preferably be less than about 30 mM NaCl and 3 mM trisodium citrate, and most preferably less than about 15 mM NaCl and 1.5 mM trisodium citrate. Stringent temperature conditions for the wash steps will ordinarily include a temperature of at least about 25° C., of at least about 42° C., or of at least about 68° C. In embodiments, wash steps will occur at 25° C. in 30 mM NaCl, 3 mM trisodium citrate, and 0.1% SDS. In a more preferred embodiment, wash steps will occur at 42° C. in 15 mM NaCl, 1.5 mM trisodium citrate, and 0.1% SDS. In other embodiments, wash steps will occur at 68° C. in 15 mM NaCl, 1.5 mM trisodium citrate, and 0.1% SDS. Additional variations on these conditions will be readily apparent to those skilled in the art.

[0190] Detection system for measuring the absence, presence, and amount of hybridization for all of the distinct nucleic acid sequences are well known in the art. For example, simultaneous detection is described in Heller et al., Proc. Natl. Acad. Sci. 94:2150-2155, 1997. In embodiments, a scanner is used to determine the levels and patterns of fluorescence.

### Polynucleotide Sequencing

[0191] Variants can be characterized by sequencing polynucleotides. Characterization of a variant can involve sequencing all or a portion of sequences or regions in targets identified herein as corresponding to the variant or all or a portion of polynucleotides from a sample capable of hybridizing to all or a portion of polynucleotide sequences identified herein or one or more of the baits described further below. The polynucleotides can be DNA fragments. In embodiments, the methods of the disclosure involve whole-genome sequencing (WGS) and/or whole-exome sequencing (WES). In some cases, the methods involve ultra low-pass sequencing.

[0192] In various aspects, the methods provided herein involve sequencing of a sample. In some embodiments, the sequencing is whole-genome sequencing (WGS) or whole-exome sequencing (WES). The sequencing is performed upon a test sample for purpose of detecting alterations, such as somatic copy number alterations, mutations (e.g., single nucleotide polymorphisms), and/or structural variations. In certain embodiments, the sequencing can be performed with or without amplification of a sample to be sequenced. In embodiments, a sample is sequenced to a coverage of about, at least about, and/or no more than about 0.01×, 0.05×, 0.1×, 0.2×, 0.3×, 0.4×, 0.5×, 1×, 2×, 3×, 4×, 5×, 7×, 8×, 9×, 10×, 20×, 30×, 40×, 50×, 60×, 70×, 90×, 100×, 200×, 300×, 400×, 500×, 600×, 700×, 800×, 900×, 1000×, 5000×, 10000×, 15000×, 20000×, 25000×, 30000×, 50000×, 100000×, or more.

[0193] Whole genome sequencing (also known as “WGS”, full genome sequencing, complete genome sequencing, or entire genome sequencing) is a process that involves sequencing a complete DNA sequence of an organism's genome. A common strategy used for WGS is shotgun sequencing, in which DNA is broken up randomly into numerous small segments, which are sequenced. Sequence data obtained from one sequencing reaction is termed a “read.” The reads can be assembled together based on sequence overlap. The genome sequence is obtained by assembling the reads into a reconstructed sequence.

[0194] Whole exome sequencing (“WES”) is a technique used to sequence all the expressed genes in a cell or subject. WES includes first selecting only that portion of a polynucleotide sample that encodes proteins (e.g., cDNA, or a subset of a cfDNA sample), and then sequencing using any DNA sequencing technology well known in the art or as described herein. In a human being, there are about 180,000 exons, which constitute about 1% of the human genome, or approximately 30 million base pairs. In some embodiments, to sequence the exons of a genome, fragments of double-stranded genomic DNA are obtained (e.g., by methods such as sonication, nuclease digestion, or any other appropriate methods). Linkers or adapters are then attached to the DNA fragments, which are then hybridized to a library of polynucleotides designed to capture only the exons. The hybridized DNA fragments are then selectively isolated and subjected to sequencing using any sequencing method known in the art or described herein.

[0195] Sequencing may be performed on any high-throughput platform. Methods of sequencing oligonucleotides and nucleic acids are well known in the art (see, e.g., WO93/23564, WO98/28440 and WO98/13523; U.S. Pat. Nos. 5,525,464; 5,202,231; 5,695,940; 4,971,903; 5,902,723; 5,795,782; 5,547,839 and 5,403,708; Sanger et al., Proc. Natl. Acad. Sci. USA 74:5463 (1977); Drmanac et al., Genomics 4:114 (1989); Koster et al., Nature Biotechnology 14:1123 (1996); Hyman, Anal. Biochem. 174:423 (1988); Rosenthal, International Patent Application Publication 761107 (1989); Metzker et al., Nucl. Acids Res. 22:4259 (1994); Jones, Biotechniques 22:938 (1997); Ronaghi et al., Anal. Biochem. 242:84 (1996); Ronaghi et al., Science 281:363 (1998); Nyren et al., Anal. Biochem. 151:504 (1985); Canard and Arzumanov, Gene 11:1 (1994); Dyatkina and Arzumanov, Nucleic Acids Symp Ser 18:117 (1987); Johnson et al., Anal. Biochem. 136:192 (1984); and Elgen and Rigler, Proc. Natl. Acad. Sci. USA 91(13):5740 (1994), all of which are expressly incorporated by reference). In one embodiment, the sequencing of a DNA fragment is carried out using commercially available sequencing technology SBS (sequencing by synthesis) by Illumina. In another embodiment, the sequencing of the DNA fragment is carried out using chain termination method of DNA sequencing. In yet another embodiment, the sequencing of the DNA fragment is carried out using one of the commercially available next-generation sequencing technologies, including SMRT (single-molecule real-time) sequencing from Pacific Biosciences, Ion Torrent™ sequencing from ThermoFisher Scientific, Pyrosequencing (454) from Roche, and SOLiD® technology from Applied Biosystems. Any appropriate sequencing technology may be chosen for sequencing.

[0196] For purpose of this disclosure, the term “amplification” means any method employing a primer and a polymerase for replicating a target sequence linearly or exponentially with reasonable fidelity. Amplification may be carried out by natural or recombinant DNA polymerases such as TaqGold™, T7 DNA polymerase, Klenow fragment of E. coli DNA polymerase, and reverse transcriptase. A preferred amplification method is PCR. Typically, the amplification of a sample results in an exponential increase in copy number of the amplified sequences. Amplification may involve thermocycling or isothermal amplification (such as through the methods RPA or LAMP).

[0197] Design and use of oligonucleotides for amplification and/or sequencing is within the knowledge of one of ordinary skill in the art. Oligonucleotides can be modified by any of a number of art-recognized moieties and/or exogenous sequences, e.g., to enhance the processes of amplification, hybridization, sequencing reactions, and/or detection. Exemplary oligonucleotide modifications that are expressly contemplated for use with the oligonucleotides of the instant disclosure include, e.g., fluorescent and/or radioactive label modifications; labeling one or more oligonucleotides with a universal amplification sequence (optionally of exogenous origin) and/or labeling one or more oligonucleotides of the instant disclosure with a unique identification sequence (e.g., a “bar-code” sequence, optionally of exogenous origin), as well as other modifications known in the art and suitable for use with oligonucleotides.

### Characterizing Molecular Tumor Burden and Tumor Fraction

[0198] In various aspects, the present disclosure provides improved methods for estimating molecular tumor burden and/or tumor fraction in a subject. Various embodiments of the methods are summarized in FIG. 23.

[0199] In various cases, the methods involve determining tumor fraction in a sample using about or at least about 1, 2, 3, 4, or 5 different methods (e.g., any one or more of the methods provided herein, including those listed in FIG. 23). In some instances, tumor fraction in a sample is estimated based upon copy number data, structural variations, and single nucleotide variations and/or indel alterations. The method further involves combining the tumor fraction estimates determined using the different methods are combined into a single tumor fraction estimate by summing the different tumor fraction estimates after multiplying each tumor fraction estimate by a weighting value, where the weight assigned to each tumor fraction estimate is inversely proportional to the variance of the method by which each respective tumor fraction estimate was determined. In various instances, the combined tumor fraction estimate is converted to molecular tumor burden (an “integrative molecular tumor burden”), which is equivalent to the amount of tumor-derived DNA in a sample expressed as the number of human genome equivalents worth of tumor-derived DNA in the sample per unit volume (i.e., human genome equivalents (GhE)/ml). Conversion of tumor fraction estimates to human genome equivalents is a unit conversion that can be readily calculated by one of skill in the art.

[0200] In embodiments, the methods each individually detect a tumor fraction of about, of at least about, and/or of less than about 1e-5, 5e-5, 1e-4, 1e-4, 1.2e-4, 2.7e-4, 6.3e-4, 1e-3, 1.5e-3, 3.4e-3, 5e-3, 7.9e-3, 1e-2, 1.8e-2, 2e-2, 3e-2, 4e-2, 4.3e-2, 5e-1, 6e-2, 7e-2, 8e-2, 9e-2, 1e-1, 2e-1, 3e-1, 4e-1, 5e-1, 6e-1, 7e-1, 8e-1, 9e-1, or 1 in a sample (e.g., cfDNA). In embodiments, the sample (e.g., cfDNA) contains a tumor fraction about, of at least about, and/or of less than about 1e-5, 5e-5, 1e-4, 1e-4, 1.2e-4, 2.7e-4, 6.3e-4, 1e-3, 1.5e-3, 3.4e-3, 5e-3, 7.9e-3, 1e-2, 1.8e-2, 2e-2, 3e-2, 4e-2, 4.3e-2, 5e-1, 6e-2, 7e-2, 8e-2, 9e-2, 1e-1, 2e-1, 3e-1, 4e-1, 5e-1, 6e-1, 7e-1, 8e-1, 9e-1, or 1. In various cases, the absolute error with which a tumor fraction is determined is about, at least about, or no more than about 0%, 1%, 2%, 3%, 4%, 5%, 6%, 7%, 8%, 9%, 10%, 11%, 12%, 13%, 14%, 15%, 20%, 25%, or 30%.

[0201] In embodiments, the method of estimating molecular tumor burden and/or tumor fraction in a subject involves whole-genome sequencing (WGS), whol-exome sequencing, and/or targeted sequencing using the baits provided herein. In some instances, the sequencing is ultra low-pass sequencing. In some cases tumor fraction based upon copy number alterations is determined based upon whole-exome sequencing and/or whole-genome sequencing data. In various cases, the methods involve determining tumor fraction estimates based upon single-nucleotide variations and/or indels, and structural variants using sequencing data prepared using the targeted sequencing probes provided herein. In some embodiments, the methods for estimating tumor fraction each individually involve analyzing one or more of WGS data, WES data, and/or targeted sequencing data prepared using the probes of the present disclosure.

[0202] In some cases, tumor fraction is estimated using sequencing data prepared from DNA in a biological sample from the subject. Non-limiting examples of DNA include circulating tumor DNA and/or cell free DNA.

[0203] In some cases, a reference sequence is used to calculate the tumor fraction estimates. A non-limiting example of a reference sequence is cell free DNA collected from a panel of normal subjects (e.g., healthy subjects that do not have cHL or PMBL).

### Treatments

[0204] The methods described herein can be used for selecting, and then optionally administering, an optimal treatment for a subject. In some embodiments, the treatment is PD-1 blockade (e.g., nivolumab/pembrolizumab, nivolumab, pembrolizumab, tislelizumab, sintilimab, and/or camrelizumab). In some cases, the PD-1 blockade comprises an antibody, such as an anti-PD-1, anti-PD-L1, or an anti-PD-L2 antibody. In other embodiments, the treatment targets a JAK/STAT pathway, NF-kB pathway, or targets a polynucleotide encoding B2M, EEF1A1, TNFAIP3, CSF2RB, XPO1, RBM38, STAT6, HLA-B, ACTbeta, NFKBIA, NFKBIE, DNAH12, ARID1A, GNA13, IKBKB, SOCS1, IGLL5, ADGRG6; CIITA and/or ETV6. In embodiments, the treatment involves administering an agent to a patient that reduces or eliminates expression and/or activity of a polypeptide selected from one or more of T cell receptor (TCR), CTLA-4, PD-1, LAG-3, BTLA, PD-1H, TIM-3/CEACAMI, TIGIT, CD96, CD112R, MHC, B7-1, B7-2, PD-L1, PD-L2, MHL-II, MVEM, PD-1H, Galectin-9, CD155, CD111, and CD 112. In some embodiments, the subject is characterized as having (i) anon-synonymous mutation in a polynucleotide(s) encoding a polypeptide selected from one or more of ACTbeta, ADGRG6, ARID1A, B2M, CSF2RB, DNAH12, EEF1A1, GNA13, HLA-B, IGLL5, IKBKB, NFKBIA, NFKBIE, RBM38, SOCS1, STAT6, TNFAIP3, XPO1, and various combinations thereof; (ii) a structural variation in a polynucleotide(s) encoding one or more of CIITA, ETV6, and combinations thereof; and/or (iii) a copy number variation in a chromosomal locus selected from one or more of 2p, 2p15, 5p, 5q, 5p15.33, 9p, 9p24.1, 1p36.32, 1q41, 6p21.32, 6q, 6q12, 6q23.3, 18q22.2, and various combinations thereof. In some embodiments, the subject is characterized as having (i) a non-synonymous mutation in a polynucleotide encoding a polypeptide selected from one or more of B2M, CSF2RB, EZH2, GNA13, HIST2H2BE, HIST1H1E, IRF2BP2, IKZF3, IL4R, PAX5, STAT6, TP53, TNFAIP3, XPO1, ZNF217, and various combinations thereof; (ii) a structural variation in a polynucleotide encoding a polypeptide selected from one or more of CIITA, PD-L1, PD-L2, and various combinations thereof; and/or (iii) a copy number variation in a chromosomal locus selected from one or more of 2p, 2q. 2p16.1, 5p, 5q, 7p, 9p24.1, 9p, 9q, 6p21.33, 6q23.3, 7q, 15q15.3, 16p13.3, 19q13.32, 21q, 22q13.2, and various combinations thereof. In some embodiments, the characterization informs treatment of the subject.

[0205] In embodiments, a subject is selected for treatment with a PD-1 blockade if cHL- or PMBL-derived DNA (e.g., cfDNA) from the subject shows high-level 9p24 somatic chromosome number alterations (SCNAs) and/or alternative genetic bases of JAK/STAT activation and retention of MHC class II expression. In some cases, a subject is selected for treatment with an immunotherapy (e.g., PD-1 blockade) if the subject shows a molecular tumor burden above a threshold, where the threshold in various instances is about, or at least about 10, 20, 30, 40, 50, 60, 70, 80, 90, 100, 110, 120, 130, 140, 160, 170, 180, 190, 200, 210, 220, 230, 240, 250, 260, 270, 280, 290, 300, 310, 320, 330, 340, 350, 360, 370, 380, 390, 400, 410, 420, 430, 440, 450, 460, 470, 480, 490, 500, 550, 600, 650, 700, 750, 800, 850, 900, 950, 1000, 1500, 2000, 2500, 3000, 3500, 4000, 4500, or 5000 HgE/ml. In embodiments, a subject is selected for treatment with an immunotherapy if the subject shows a molecular tumor burden that is higher (e.g., significantly higher), than that of a reference subject (e.g., a healthy subject). In embodiments, a subject is selected for treatment with an immunotherapy if the subject shows a molecular tumor burden that is higher than that of a reference subject (e.g., a healthy subject) by about or at least about 10, 20, 30, 40, 50, 60, 70, 80, 90, 100, 110, 120, 130, 140, 160, 170, 180, 190, 200, 210, 220, 230, 240, 250, 260, 270, 280, 290, 300, 310, 320, 330, 340, 350, 360, 370, 380, 390, 400, 410, 420, 430, 440, 450, 460, 470, 480, 490, 500, 550, 600, 650, 700, 750, 800, 850, 900, 950, or 1000, 1500, 2000, 2500, 3000, 3500, 4000, 4500, or 5000 HgE/ml.

[0206] In some embodiments, a biological sample of a subject containing ctDNA is characterized using an SNP probe to detect alterations (e.g., non-synonymous mutations, copy number gains, copy number losses, or structural variations). In some embodiments, the alteration is e.g., a non-synonymous mutation in a polynucleotide(s) encoding one or more of ACTbeta, ADGRG6, ARID1A, B2M, CSF2RB, DNAH12, EEF1A1, EZH2, GNA13, HLA-B, HIST2H2BE, HIST1H1E, IGLL5, IKBKB, IRF2BP2, IKZF3, IL4R, NFKBIA, NFKBIE, RBM38, SOCS1, STAT6, TNFAIP3, TP53, XPO1 and ZNF217; a structural variation in a polynucleotide encoding a polypeptide(s) selected from one or more of CIITA, ETV6, PD-L1, and PD-L2; and/or a copy number loss or gain in a chromosomal locus selected from one or more of 2p, 2p15, 2q. 2p16.1, 5p, 5q, 5p15.33, 6p21.33, 7p, 7q, 9p, 9q, 9p24.1, 1p36.32, 1q41, 6p21.32, 6q, 6q12, 6q23.3, 15q15.3, 16p13.3, 18q22.2, 21q, and 22q13.2. In some cases a copy number variation is determined by characterizing a copy number variation in a polynucleotide encoding a polypeptide selected from one or more of HLA-B, JAK2, NFKBIE, PD-L1, PD-L2, REL, SOCS6, TNFAIP3, and XPO1. Thus the methods described herein include methods for the treatment of cancer, particularly cHL and/or PMBL, having one of the aforementioned alterations. Generally, the methods include administering a therapeutically effective amount of a treatment as described herein, to a subject who is in need thereof, or who has been determined to be in need of, such treatment.

[0207] As used in this context, to “treat” means to ameliorate at least one symptom of the cancer. For example, a treatment can result in a reduction in tumor size, tumor growth, cancer cell number, cancer cell growth, or metastasis or risk of metastasis.

[0208] For example, the methods can include selecting and/or administering a treatment that includes a therapeutically effective amount of a PD-1 blockade (e.g., nivolumab/pembrolizumab, nivolumab, pembrolizumab, tislelizumab, sintilimab, and/or camrelizumab).

[0209] Two ligands for PD-1 include PD-L1 (B7-H1, also called CD274 molecule) and PD-L2 (b7-DC). The PD-L1 ligand is abundant in a variety of human cancers. The interaction of PD-L1 with PD-1 generally results in a decrease in tumor infiltrating lymphocytes, a decrease in T-cell receptor mediated proliferation, and immune evasion by the cancerous cells. See, e.g., Dong et al., Nat. Med., 8:787-789 (2002); Blank et al., Cancer Immunol. Immunother., 54:307-314 (2005); and Konishi et al., Clin. Cancer Res., 10:5094-5100 (2004), the teachings of each of which have been incorporated herein by reference in their entireties.

[0210] Inhibition of the interaction of PD-1 with PD-L1 can restore immune cell activation, such as T-cell activity, to reduce tumorigenesis and metastasis, making PD-1 and PD-L1 advantageous cancer therapies. See, e.g., Yang J. et al., J Immunol. August 1; 187(3): 113-9 (2011), the teachings of which has been incorporated herein by reference in its entirety.

[0211] Non-limiting examples of PD-1 blockades that can be administered to a subject in need of treatment include Atezolizumab (Tecentriq, MPDL3280A, RG7446), Avelumab (Bavencio, MSB0010718C), BMS-936559 (MDX-1105), Cemiplimab (Libtayo REGN-2810, REGN2810, cemiplimab-rwlc), Durvalumab (MEDI4736, MEDI-4736), Nivolumab (Opdivo ONO-4538, BMS-936558, MDX1106), Pembrolizumab (Keytruda, MK-3475), Sintilimab, Tislelizumab, and various combinations thereof.

[0212] In some embodiments, the methods can include administering a treatment in accordance with the disclosures of U.S. Pat. Nos. 10,342,865 and 10,052,372, and U.S. Patent Application Publication Nos. 20200172864 and 20190352373, the contents of which are incorporated by reference in their entirety.

[0213] In some embodiments, the methods can include administering at least one of an autologous CD30 CAR-T cell, an autologous CAR EBVST cell, or any combination thereof.

[0214] In some embodiments, the methods can include administering at least one of Atezolizumab (Tecentriq, MPDL3280A, RG7446), Avelumab (Bavencio, MSB0010718C), BMS-936559 (MDX-1105), Cemiplimab (Libtayo REGN-2810, REGN2810, cemiplimab-rwlc), Durvalumab (MEDI4736, MEDI-4736), Nivolumab (Opdivo ONO-4538, BMS-936558, MDX1106), Pembrolizumab (Keytruda, MK-3475), Sintilimab, Tislelizumab, BMS-936558, MDX-1106, NIVO, ONO-4538, Opdivo, ifosfamide, Asta Z 4942, Asta Z-4942, Cyfos, Holoxan, Holoxane, Ifex, IFO, IFO-Cell, Ifolem, Ifomida, Ifomide, Ifosfamidum, Ifoxan, IFX, Iphosphamid, Iphosphamide, Iso-Endoxan, Isoendoxan, Isophosphamide, Mitoxana, MJF 9325, MJF-9325, Naxamide, Seromida, Tronoxal, Z 4942, Z-4942, carboplatin, Blastocarb, Carboplat, Carboplatin Hexal, Carboplatino, Carboplatinum, Carbosin, Carbosol, Carbotec, CBDCA, Displata, Ercar, JM-8, Nealorin, Novoplatinum, Paraplatin, Paraplatin AQ, Paraplatine, Platinwas, Ribocarbo, etoposide, Demethyl Epipodophyllotoxin Ethylidine Glucoside, EPEG, Lastet, Toposar, Vepesid, VP 16, VP 16-213, VP-16, VP-16-213, VP16, Dacarbazine, 4-(Dimethyltriazeno)imidazole-5-carboxamide, 5-(Dimethyltriazeno)imidazole-4-carboxamide, Asercit, Biocarbazine, Dacarbazina, Dacarbazina Almirall, Dacarbazine—DTIC, Dacatic, Dakarbazin, Deticene, Detimedac, DIC, Dimethyl (triazeno) imidazolecarboxamide, Dimethyl Triazeno Imidazol Carboxamide, Dimethyl Triazeno Imidazole Carboxamide, dimethyl-triazeno-imidazole carboxamide, Dimethyl-triazeno-imidazole-carboximide, DTIC, DTIC-Dome, Fauldetic, Imidazole Carboxamide, Imidazole Carboxamide Dimethyltriazeno, WR-139007, Doxorubicin Hydrochloride, 5,12-Naphthacenedione, 10-[(3-amino-2,3,6-trideoxy-alpha-L-lyxo-hexopyranosyl)oxy]-7,8,9,10-tetrahydro-6,8,11-trihydroxy-8-(hydroxyacetyl)-1-methoxy-, hydrochloride, (8S-cis)-(9CI), ADM, Adriacin, Adriamycin, Adriamycin Hydrochloride, Adriamycin PFS, Adriamycin RDF, Adriamycin Hydrochloride, Adriamycine, Adriblastina, Adriblastine, Adrimedac, Chloridrato de Doxorrubicina, DOX, DOXO-CELL, Doxolem, Doxorubicin HCl, Doxorubicin.HCl, Doxorubin, Farmiblastina, FI 106, FI-106, hydroxydaunorubicin, Rubex, Filgrastim, Filgrastim-aafi, G-CSF, Neupogen, Nivestym, r-metHuG-CSF, Recombinant Methionyl Human Granulocyte Colony Stimulating Factor, rG-CSF, Tevagrastim, Pegfilgrastim, Filgrastim SD-01, filgrastim-SD/01, Fulphila, HSP-130, Jinyouli, Neulasta, Neulastim, Nyvepria, Pegcyte, Pegfilgrastim Biosimilar HSP-130, Pegfilgrastim Biosimilar Nyvepria, Pegfilgrastim Biosimilar Pegcyte, Pegfilgrastim Biosimilar Udenyca, Pegfilgrastim Biosimilar Ziextenzo, pegfilgrastim-apgf, pegfilgrastim-bmez, pegfilgrastim-cbqv, Pegfilgrastim-jmdb, SD-01, SD-01 sustained duration G-CSF, Udenyca, Ziextenzo, Vinblastine Sulfate, 29060 LE, 29060-LE, Exal, Velban, Velbe, Velsar, Vincaleukoblastine, Brentuximab Vedotin, ADC SGN-35, Adcetris, Anti-CD30 Antibody-Drug Conjugate SGN-35, Anti-CD30 Monoclonal Antibody-MMAE SGN-35, Anti-CD30 Monoclonal Antibody-Monomethylauristatin E SGN-35, cAC10-vcMMAE, SGN-35, CD30.CAR-T, Autologous CD30.CAR-T cells infused on Day 0 after the completion of lymphodepleting chemotherapy, CD30-directed genetically modified autologous T cells, Fludarabine, Fludara, Bendamustine, Bendeka, CD30.CAR-EBVST cells, Allogeneic CD30 Chimeric Antigen Receptor Epstein-Barr Virus-Specific T Lymphocytes, or any combination thereof.

[0215] Antibody Drug Conjugates (ADC) are known in the art and described for example in the following U.S. Pat. Nos. 10,799,596; 10,780,096; 10,544,223; 10,017,580; 9,956,299; 9,950,078; 9,931,415; 9,931,414; and 9,919,056, each of which is incorporated by reference in its entirety, which are assigned to ADC Therapeutics. In some embodiments, a therapeutic useful in the invention is ADCT-601, 602, 901, or 701.

### Reporting the Status

[0216] Additional embodiments of the invention relate to the communication of assay results, characterization of disease, or diagnoses or both to technicians, physicians or patients, for example. In certain embodiments, computers will be used to communicate assay results or diagnoses or both to interested parties, e.g., physicians and their patients. In some embodiments, the assays will be performed or the assay results analyzed in a country or jurisdiction which differs from the country or jurisdiction to which the results or diagnoses are communicated.

[0217] In a preferred embodiment of the invention, a diagnosis is communicated to the subject as soon as possible after the diagnosis is obtained. The diagnosis may be communicated to the subject by the subject's treating physician. Alternatively, the diagnosis may be sent to a subject by email or communicated to the subject by phone. A computer may be used to communicate the diagnosis by email or phone. In certain embodiments, the message containing results of a diagnostic test may be generated and delivered automatically to the subject using a combination of computer hardware and software which will be familiar to artisans skilled in telecommunications. One example of a healthcare-oriented communications system is described in U.S. Pat. No. 6,283,761; however, the present invention is not limited to methods which utilize this particular communications system. In certain embodiments of the methods of the invention, all or some of the method steps, including the assaying of samples, diagnosing of diseases, and communicating of assay results or diagnoses, may be carried out in diverse (e.g., foreign) jurisdictions.

### Subject Management

[0218] In certain embodiments, the methods of the invention involve managing subject treatment based on disease status (e.g., complete remission, partial remission, resistant disease, stable disease) or based on characterization of ctDNA from the subject for an alteration. Such management includes referral, for example, to a qualified specialist (e.g., an oncologist). In one embodiment, if a physician makes a diagnosis of a neoplasm or cancer (e.g., cHL, PMBL), then a certain regime of treatment, such as prescription or administration of therapeutic agent (e.g., PD-1 blockade) might follow. Alternatively, a diagnosis of non-cancer might be followed with further testing to determine a specific disease that the patient might be suffering from. Also, if the diagnostic test gives an inconclusive result on cancer status, further tests may be called for.

[0219] Additional embodiments of the invention relate to the communication of assay results or diagnoses or both to technicians, physicians, or patients. In certain embodiments, computers will be used to communicate assay results or diagnoses or both to interested parties, e.g., physicians and their patients. In some embodiments, the assays will be performed, or the assay results analyzed in a country or jurisdiction which differs from the country or jurisdiction to which the results or diagnoses are communicated.

[0220] The methods provided herein can be used for clinical cancer management, such as for the diagnosis of a cancer, for detection of a cancer, for minimal residual disease monitoring, for tracking of treatment efficacy, or for detecting a cancer in a subject. Tumor fraction (TF) of cell free DNA and/or molecular tumor burden is used in various embodiments as a biomarker to diagnose cancer, characterize a cancer, detect cancer relapse, or detect treatment failure. In embodiments, cell free DNA TF dynamics are monitored to track and/or measure tumor burden (e.g., through calculation of molecular tumor burden) and/or indicate treatment efficacy. Cell free DNA TF dynamics aligns well with tumor burden, and is, therefore, a biomarker to indicate cancer relapse due to drug resistance. In various instances, the methods provided herein are used for early screening and/or in clinical cancer management.

[0221] In various instances, the methods provided herein are used to measure tumor fraction in a polynucleotide sample taken from a subject. The measurements can be taken periodically at regular intervals. In some cases, measurements are taken about, at least about, or no more than about 1, 2, 3, 4, 5, 6, 7, 8, 9, 10, 11, 12, 13, 14, or 15 times every or about every 1 day, 3 days, 1 week, 1 month, 2 months, 3 months, 4 months, 5 months, 6 months, 7 months, 8 months, 9 months, 10 months, 11 months, 12 months, 1.5 years, 2 years, 3 years, 4 years, or 5 years. In some instances, measurements are taken as part of a routine physical. In some cases, tumor fraction is measured as part of a process to monitor a subject for cancer. The polynucleotide sample in various cases is cfDNA.

### Pharmaceutical Compositions

[0222] Agents of the present disclosure can be incorporated into a variety of formulations for therapeutic use (e.g., by administration) or in the manufacture of a medicament (e.g., for treating or preventing a cHL and PMBL) by combining the agents with appropriate pharmaceutically acceptable carriers or diluents, and may be formulated into preparations in solid, semi-solid, liquid or gaseous forms. Examples of such formulations include, without limitation, tablets, capsules, powders, granules, ointments, solutions, suppositories, injections, inhalants, gels, microspheres, and aerosols.

[0223] Pharmaceutical compositions can include, depending on the formulation desired, pharmaceutically-acceptable, non-toxic carriers of diluents, which are vehicles commonly used to formulate pharmaceutical compositions for animal or human administration The diluent is selected so as not to affect the biological activity of the combination. Examples of such diluents include. without limitation, distilled water, buffered water, physiological saline, PBS, Ringer's solution, dextrose solution, and Hank's solution. A pharmaceutical composition or formulation of the present disclosure can further include other carriers, adjuvants, or non-toxic, nontherapeutic, nonimmunogenic stabilizers, excipients and the like. The compositions can also include additional substances to approximate physiological conditions, such as pH adjusting and buffering agents. toxicity adjusting agents, wetting agents and detergents.

[0224] Further examples of formulations that are suitable for various types of administration can be found in Remington's Pharmaceutical Sciences, Mace Publishing Company, Philadelphia, Pa., 17th ed. (1985). For a brief review of methods for drug delivery, see, Langer, Science 249: 1527-1533 (1990).

[0225] For oral administration, the active ingredient can be administered in solid dosage forms, such as capsules, tablets, and powders, or in liquid dosage forms, such as elixirs, syrups, and suspensions. The active component(s) can be encapsulated in gelatin capsules together with inactive ingredients and powdered carriers, such as glucose, lactose, sucrose, mannitol, starch, cellulose or cellulose derivatives, magnesium stearate, stearic acid, sodium saccharin, talcum, magnesium carbonate. Examples of additional inactive ingredients that may be added to provide desirable color, taste, stability, buffering capacity, dispersion or other known desirable features are red iron oxide, silica gel, sodium lauryl sulfate, titanium dioxide, and edible white ink.

[0226] Similar diluents can be used to make compressed tablets. Both tablets and capsules can be manufactured as sustained release products to provide for continuous release of medication over a period of hours. Compressed tablets can be sugar coated or film coated to mask any unpleasant taste and protect the tablet from the atmosphere, or enteric-coated for selective disintegration in the gastrointestinal tract. Liquid dosage forms for oral administration can contain coloring and flavoring to increase patient acceptance.

[0227] Formulations suitable for parenteral administration include aqueous and non-aqueous, isotonic sterile injection solutions, which can contain antioxidants, buffers, bacteriostats, and solutes that render the formulation isotonic with the blood of the intended recipient, and aqueous and non-aqueous sterile suspensions that can include suspending agents, solubilizers, thickening agents. stabilizers, and preservatives.

[0228] As used herein, the term “pharmaceutically acceptable salt” refers to those salts which are, within the scope of sound medical judgment, suitable for use in contact with the tissues of humans and lower animals without undue toxicity, irritation, allergic response and the like, and are commensurate with a reasonable benefit/risk ratio. Pharmaceutically acceptable salts of amines, carboxylic acids, and other types of compounds, are well known in the art. For example, S. M. Berge, et al. describe pharmaceutically acceptable salts in detail in J Pharmaceutical Sciences 66 (1977): 1-19, incorporated herein by reference. The salts can be prepared in situ during the final isolation and purification of the compounds (e.g., FDA-approved compounds) of the application, or separately by reacting a free base or free acid function with a suitable reagent, as described generally below. For example, a free base function can be reacted with a suitable acid. Furthermore, where the compounds to be administered of the application carry an acidic moiety, suitable pharmaceutically acceptable salts thereof may, include metal salts such as alkali metal salts, e.g. sodium or potassium salts; and alkaline earth metal salts, e.g. calcium or magnesium salts. Examples of pharmaceutically acceptable, nontoxic acid addition salts are salts of an amino group formed with inorganic acids such as hydrochloric acid, hydrobromic acid, phosphoric acid, sulfuric acid and perchloric acid or with organic acids such as acetic acid, oxalic acid, maleic acid, tartaric acid, citric acid, succinic acid or malonic acid or by using other methods used in the art such as ion exchange. Other pharmaceutically acceptable salts include adipate, alginate, ascorbate, aspartate, benzenesulfonate, benzoate, bisulfate, borate, butyrate, camphorate, camphorsulfonate, citrate, cyclopentanepropionate, digluconate, dodecylsulfate, ethanesulfonate, formate, fumarate, glucoheptonate, glycerophosphate, gluconate, hemisulfate, heptanoate, hexanoate, hydroiodide, 2-hydroxy-ethanesulfonate, lactobionate, lactate, laurate, lauryl sulfate, malate, maleate, malonate, methanesulfonate, 2-naphthalenesulfonate, nicotinate, nitrate, oleate, oxalate, palmitate, pamoate, pectinate, persulfate, 3-phenylpropionate, phosphate, picrate, pivalate, propionate, stearate, succinate, sulfate, tartrate, thiocyanate, p-toluenesulfonate, undecanoate, valerate salts, and the like. Representative alkali or alkaline earth metal salts include sodium, lithium, potassium, calcium, magnesium, and the like. Further pharmaceutically acceptable salts include, when appropriate, nontoxic ammonium, quaternary ammonium, and amine cations formed using counterions such as halide, hydroxide, carboxylate, sulfate, phosphate, nitrate, loweralkyl sulfonate and aryl sulfonate.

[0229] Additionally, as used herein, the term “pharmaceutically acceptable ester” refers to esters that hydrolyze in vivo and include those that break down readily in the human body to leave the parent compound (e.g., an FDA-approved compound where administered to a human subject) or a salt thereof. Suitable ester groups include, for example, those derived from pharmaceutically acceptable aliphatic carboxylic acids, particularly alkanoic, alkenoic, cycloalkanoic and alkanedioic acids, in which each alkyl or alkenyl moiety advantageously has not more than 6 carbon atoms.

[0230] Examples of particular esters include formates, acetates, propionates, butyrates, acrylates and ethylsuccinates.

[0231] Furthermore, the term “pharmaceutically acceptable prodrugs” as used herein refers to those prodrugs of the certain compounds of the present application which are, within the scope of sound medical judgment, suitable for use in contact with the issues of humans and lower animals with undue toxicity, irritation, allergic response, and the like, commensurate with a reasonable benefit/risk ratio, and effective for their intended use, as well as the zwitterionic forms, where possible, of the compounds of the application. The term “prodrug” refers to compounds that are rapidly transformed in vivo to yield the parent compound of an agent of the instant disclosure, for example by hydrolysis in blood. A thorough discussion is provided in T. Higuchi and V. Stella, Pro-drugs as Novel Delivery Systems, Vol. 14 of the A.C.S. Symposium Series, and in Edward B. Roche, ed., Bioreversible Carriers in Drug Design, American Pharmaceutical Association and Pergamon Press, (1987), both of which are incorporated herein by reference.

[0232] The components used to formulate the pharmaceutical compositions are preferably of high purity and are substantially free of potentially harmful contaminants (e.g., at least National Food (NF) grade, generally at least analytical grade, and more typically at least pharmaceutical grade) Moreover, compositions intended for in vivo use are usually sterile. To the extent that a given compound must be synthesized prior to use, the resulting product is typically substantially free of any potentially toxic agents, particularly any endotoxins, which may be present during the synthesis or purification process. Compositions for parental administration are also sterile, substantially isotonic and made under GMP conditions.

[0233] Formulations may be optimized for retention and stabilization in a subject and/or tissue of a subject, e.g., to prevent rapid clearance of a formulation by the subject. Stabilization techniques include cross-linking. multimerizing, or linking to groups such as polyethylene glycol. polyacrylamide, neutral protein carriers, etc. in order to achieve an increase in molecular weight.

[0234] Other strategies for increasing retention include the entrapment of the agent, such as a PD-1 blockade or JAK/STAT inhibitor in a biodegradable or bioerodible implant. The rate of release of the therapeutically active agent is controlled by the rate of transport through the polymeric matrix, and the biodegradation of the implant. The transport of drug through the polymer barrier will also be affected by compound solubility, polymer hydrophilicity, extent of polymer cross-linking, expansion of the polymer upon water absorption so as to make the polymer barrier more permeable to the drug, geometry of the implant, and the like. The implants are of dimensions commensurate with the size and shape of the region selected as the site of implantation Implants may be particles, sheets, patches, plaques, fibers, microcapsules and the like and may be of any size or shape compatible with the selected site of insertion.

[0235] The implants may be monolithic, i.e. having the active agent homogenously distributed through the polymeric matrix, or encapsulated, where a reservoir of active agent is encapsulated by the polymeric matrix. The selection of the polymeric composition to be employed will vary with the site of administration, the desired period of treatment, patient tolerance, the nature of the disease to be treated and the like. Characteristics of the polymers will include biodegradability at the site of implantation, compatibility with the agent of interest, ease of encapsulation, a half-life in the physiological environment.

[0236] Biodegradable polymeric compositions which may be employed may be organic esters or ethers, which when degraded result in physiologically acceptable degradation products, including the monomers Anhydrides, amides, orthoesters or the like, by themselves or in combination with other monomers, may find use. The polymers will be condensation polymers. The polymers may be cross-linked or non-cross-linked. Of particular interest are polymers of hydroxyaliphatic carboxylic acids, either homo- or copolymers, and polysaccharides. Included among the polyesters of interest are polymers of D-lactic acid, L-lactic acid, racemic lactic acid, glycolic acid, polycaprolactone, and combinations thereof. By employing the L-lactate or D-lactate, a slowly biodegrading polymer is achieved, while degradation is substantially enhanced with the racemate. Copolymers of glycolic and lactic acid are of particular interest, where the rate of biodegradation is controlled by the ratio of glycolic to lactic acid. The most rapidly degraded copolymer has roughly equal amounts of glycolic and lactic acid, where either homopolymer is more resistant to degradation. The ratio of glycolic acid to lactic acid will also affect the brittleness of in the implant, where a more flexible implant is desirable for larger geometries. Among the polysaccharides of interest are calcium alginate, and functionalized celluloses, particularly carboxymethylcellulose esters characterized by being water insoluble, a molecular weight of about 5 kD to 500 kD, etc. Biodegradable hydrogels may also be employed in the implants of the individual instant disclosure. Hydrogels are typically a copolymer material, characterized by the ability to imbibe a liquid. Exemplary biodegradable hydrogels which may be employed are described in Heller in: Hydrogels in Medicine and Pharmacy, N. A. Peppes ed., Vol. III, CRC Press, Boca Raton, Fla., 1987, pp 137-149.

### Pharmaceutical Dosages

[0237] Pharmaceutical compositions of the present disclosure containing an agent described herein may be used (e.g., administered to an individual, such as a human individual, in need of treatment with an agent (e.g., a PD-1 blockade, JAK/STAT inhibitor, etc.) in accord with known methods, such as oral administration, intravenous administration as a bolus or by continuous infusion over a period of time, by intramuscular, intraperitoneal, intracerobrospinal, intracranial, intraspinal, subcutaneous, intraarticular, intrasynovial, intrathecal, topical, or inhalation routes.

[0238] Dosages and desired drug concentration of pharmaceutical compositions of the present disclosure may vary depending on the particular use envisioned. The determination of the appropriate dosage or route of administration is well within the skill of an ordinary artisan. Animal experiments provide reliable guidance for the determination of effective doses for human therapy. Interspecies scaling of effective doses can be performed following the principles described in Mordenti, J. and Chappell, W. “The Use of Interspecies Scaling in Toxicokinetics,” In Toxicokinetics and New Drug Development, Yacobi et al., Eds, Pergamon Press, New York 1989, pp. 42-46.

[0239] For in vivo administration of any of the agents of the present disclosure, normal dosage amounts may vary from about 10 ng/kg up to about 100 mg/kg of an individual's and/or subject's body weight or more per day, depending upon the route of administration. In some embodiments, the dose amount is about 1 mg/kg/day to 10 mg/kg/day. For repeated administrations over several days or longer, depending on the severity of the disease, disorder, or condition to be treated, the treatment is sustained until a desired suppression of symptoms is achieved.

[0240] An effective amount of an agent of the instant disclosure may vary, e.g., from about 0.001 mg/kg to about 1000 mg/kg or more in one or more dose administrations for one or several days (depending on the mode of administration). In certain embodiments, the effective amount per dose varies from about 0.001 mg/kg to about 1000 mg/kg, from about 0.01 mg/kg to about 750 mg/kg, from about 0.1 mg/kg to about 500 mg/kg, from about 1.0 mg/kg to about 250 mg/kg, and from about 10.0 mg/kg to about 150 mg/kg.

[0241] An exemplary dosing regimen may include administering an initial dose of an agent of the disclosure of about 200 μg/kg, followed by a weekly maintenance dose of about 100 μg/kg every other week. Other dosage regimens may be useful, depending on the pattern of pharmacokinetic decay that the physician wishes to achieve. For example, dosing an individual from one to twenty-one times a week is contemplated herein. In certain embodiments, dosing ranging from about 3 μg/kg to about 2 mg/kg (such as about 3 μg/kg, about 10 μg/kg, about 30 μg/kg. about 100 μg/kg, about 300 μg/kg, about 1 mg/kg. or about 2 mg/kg) may be used. In certain embodiments, dosing frequency is three times per day, twice per day, once per day. once every other day. once weekly, once every two weeks, once every four weeks, once every five weeks, once every six weeks, once every seven weeks, once every eight weeks, once every nine weeks, once every ten weeks, or once monthly, once every two months, once every three months, or longer. Progress of the therapy is easily monitored by conventional techniques and assays. The dosing regimen, including the agent(s) administered, can vary over time independently of the dose used.

[0242] Pharmaceutical compositions described herein can be prepared by any method known in the art of pharmacology. In general, such preparatory methods include the steps of bringing the agent or compound described herein (i.e., the “active ingredient”) into association with a carrier or excipient, and/or one or more other accessory ingredients, and then, if necessary and/or desirable, shaping, and/or packaging the product into a desired single- or multi-dose unit.

[0243] Pharmaceutical compositions can be prepared, packaged, and/or sold in bulk, as a single unit dose, and/or as a plurality of single unit doses. A “unit dose” is a discrete amount of the pharmaceutical composition comprising a predetermined amount of the active ingredient. The amount of the active ingredient is generally equal to the dosage of the active ingredient which would be administered to a subject and/or a convenient fraction of such a dosage such as, for example, one-half or one-third of such a dosage.

[0244] Relative amounts of the active ingredient, the pharmaceutically acceptable excipient, and/or any additional ingredients in a pharmaceutical composition described herein will vary, depending upon the identity, size, and/or condition of the subject treated and further depending upon the route by which the composition is to be administered. The composition may comprise between 0.1% and 100% (w/w) active ingredient.

[0245] Pharmaceutically acceptable excipients used in the manufacture of provided pharmaceutical compositions include inert diluents, dispersing and/or granulating agents, surface active agents and/or emulsifiers, disintegrating agents, binding agents, preservatives, buffering agents, lubricating agents, and/or oils. Excipients such as cocoa butter and suppository waxes, coloring agents, coating agents, sweetening, flavoring, and perfuming agents may also be present in the composition.

[0246] Exemplary diluents include calcium carbonate, sodium carbonate, calcium phosphate, dicalcium phosphate, calcium sulfate, calcium hydrogen phosphate, sodium phosphate lactose, sucrose, cellulose, microcrystalline cellulose, kaolin, mannitol, sorbitol, inositol, sodium chloride, dry starch, cornstarch, powdered sugar, and mixtures thereof.

[0247] Exemplary granulating and/or dispersing agents include potato starch, corn starch, tapioca starch, sodium starch glycolate, clays, alginic acid, guar gum, citrus pulp, agar, bentonite, cellulose, and wood products, natural sponge, cation-exchange resins, calcium carbonate, silicates, sodium carbonate, cross-linked poly(vinyl-pyrrolidone) (crospovidone), sodium carboxymethyl starch (sodium starch glycolate), carboxymethyl cellulose, cross-linked sodium carboxymethyl cellulose (croscarmellose), methylcellulose, pregelatinized starch (starch 1500), microcrystalline starch, water insoluble starch, calcium carboxymethyl cellulose, magnesium aluminum silicate (Veegum), sodium lauryl sulfate, quaternary ammonium compounds, and mixtures thereof.

[0248] Exemplary surface active agents and/or emulsifiers include natural emulsifiers (e.g., acacia, agar, alginic acid, sodium alginate, tragacanth, chondrux, cholesterol, xanthan, pectin, gelatin, egg yolk, casein, wool fat, cholesterol, wax, and lecithin), colloidal clays (e.g., bentonite (aluminum silicate) and Veegum (magnesium aluminum silicate)), long chain amino acid derivatives, high molecular weight alcohols (e.g., stearyl alcohol, cetyl alcohol, oleyl alcohol, triacetin monostearate, ethylene glycol distearate, glyceryl monostearate, and propylene glycol monostearate, polyvinyl alcohol), carbomers (e.g., carboxy polymethylene, polyacrylic acid, acrylic acid polymer, and carboxyvinyl polymer), carrageenan, cellulosic derivatives (e.g., carboxymethylcellulose sodium, powdered cellulose, hydroxymethyl cellulose, hydroxypropyl cellulose, hydroxypropyl methylcellulose, methylcellulose), sorbitan fatty acid esters (e.g., polyoxyethylene sorbitan monolaurate (Tween® 20), polyoxyethylene sorbitan (Tween® 60), polyoxyethylene sorbitan monooleate (Tween® 80), sorbitan monopalmitate (Span® 40), sorbitan monostearate (Span® 60), sorbitan tristearate (Span® 65), glyceryl monooleate, sorbitan monooleate (Span® 80), polyoxyethylene esters (e.g., polyoxyethylene monostearate (Myrj® 45), polyoxyethylene hydrogenated castor oil, polyethoxylated castor oil, polyoxymethylene stearate, and Solutol®), sucrose fatty acid esters, polyethylene glycol fatty acid esters (e.g., Cremophor®), polyoxyethylene ethers, (e.g., polyoxyethylene lauryl ether (Brij® 30)), poly(vinyl-pyrrolidone), diethylene glycol monolaurate, triethanolamine oleate, sodium oleate, potassium oleate, ethyl oleate, oleic acid, ethyl laurate, sodium lauryl sulfate, Pluronic® F-68, Poloxamer P-188, cetrimonium bromide, cetylpyridinium chloride, benzalkonium chloride, docusate sodium, and/or mixtures thereof.

[0249] Exemplary binding agents include starch (e.g., cornstarch and starch paste), gelatin, sugars (e.g., sucrose, glucose, dextrose, dextrin, molasses, lactose, lactitol, mannitol, etc.), natural and synthetic gums (e.g., acacia, sodium alginate, extract of Irish moss, panwar gum, ghatti gum, mucilage of isapol husks, carboxymethylcellulose, methyl cellulose, ethylcellulose, hydroxyethylcellulose, hydroxypropyl cellulose, hydroxypropyl methylcellulose, microcrystalline cellulose, cellulose acetate, poly(vinyl-pyrrolidone), magnesium aluminum silicate (Veegum®), and larch arabogalactan), alginates, polyethylene oxide, polyethylene glycol, inorganic calcium salts, silicic acid, polymethacrylates, waxes, water, alcohol, and/or mixtures thereof.

[0250] Exemplary preservatives include antioxidants, chelating agents, antimicrobial preservatives, antifungal preservatives, antiprotozoan preservatives, alcohol preservatives, acidic preservatives, and other preservatives. In certain embodiments, the preservative is an antioxidant. In other embodiments, the preservative is a chelating agent.

[0251] Exemplary antioxidants include alpha tocopherol, ascorbic acid, acorbyl palmitate, butylated hydroxyanisole, butylated hydroxytoluene, monothioglycerol, potassium metabisulfite, propionic acid, propyl gallate, sodium ascorbate, sodium bisulfite, sodium metabisulfite, and sodium sulfite.

[0252] Exemplary chelating agents include ethylenediaminetetraacetic acid (EDTA) and salts and hydrates thereof (e.g., sodium edetate, disodium edetate, trisodium edetate, calcium disodium edetate, dipotassium edetate, and the like), citric acid and salts and hydrates thereof (e.g., citric acid monohydrate), fumaric acid and salts and hydrates thereof, malic acid and salts and hydrates thereof, phosphoric acid and salts and hydrates thereof, and tartaric acid and salts and hydrates thereof. Exemplary antimicrobial preservatives include benzalkonium chloride, benzethonium chloride, benzyl alcohol, bronopol, cetrimide, cetylpyridinium chloride, chlorhexidine, chlorobutanol, chlorocresol, chloroxylenol, cresol, ethyl alcohol, glycerin, hexetidine, imidurea, phenol, phenoxyethanol, phenylethyl alcohol, phenylmercuric nitrate, propylene glycol, and thimerosal.

[0253] Exemplary antifungal preservatives include butyl paraben, methyl paraben, ethyl paraben, propyl paraben, benzoic acid, hydroxybenzoic acid, potassium benzoate, potassium sorbate, sodium benzoate, sodium propionate, and sorbic acid.

[0254] Exemplary alcohol preservatives include ethanol, polyethylene glycol, phenol, phenolic compounds, bisphenol, chlorobutanol, hydroxybenzoate, and phenylethyl alcohol.

[0255] Exemplary acidic preservatives include vitamin A, vitamin C, vitamin E, beta-carotene, citric acid, acetic acid, dehydroacetic acid, ascorbic acid, sorbic acid, and phytic acid.

[0256] Other preservatives include tocopherol, tocopherol acetate, deteroxime mesylate, cetrimide, butylated hydroxyanisol (BHA), butylated hydroxytoluened (BHT), ethylenediamine, sodium lauryl sulfate (SLS), sodium lauryl ether sulfate (SLES), sodium bisulfite, sodium metabisulfite, potassium sulfite, potassium metabisulfite, Glydant® Plus, Phenonip®, methylparaben, Germall® 115, Germaben® II, Neolone®, Kathon®, and Euxyl®.

[0257] Exemplary buffering agents include citrate buffer solutions, acetate buffer solutions, phosphate buffer solutions, ammonium chloride, calcium carbonate, calcium chloride, calcium citrate, calcium glubionate, calcium gluceptate, calcium gluconate, D-gluconic acid, calcium glycerophosphate, calcium lactate, propanoic acid, calcium levulinate, pentanoic acid, dibasic calcium phosphate, phosphoric acid, tribasic calcium phosphate, calcium hydroxide phosphate, potassium acetate, potassium chloride, potassium gluconate, potassium mixtures, dibasic potassium phosphate, monobasic potassium phosphate, potassium phosphate mixtures, sodium acetate, sodium bicarbonate, sodium chloride, sodium citrate, sodium lactate, dibasic sodium phosphate, monobasic sodium phosphate, sodium phosphate mixtures, tromethamine, magnesium hydroxide, aluminum hydroxide, alginic acid, pyrogen-free water, isotonic saline, Ringer's solution, ethyl alcohol, and mixtures thereof.

[0258] Exemplary lubricating agents include magnesium stearate, calcium stearate, stearic acid, silica, talc, malt, glyceryl behanate, hydrogenated vegetable oils, polyethylene glycol, sodium benzoate, sodium acetate, sodium chloride, leucine, magnesium lauryl sulfate, sodium lauryl sulfate, and mixtures thereof.

[0259] Exemplary natural oils include almond, apricot kernel, avocado, babassu, bergamot, black current seed, borage, cade, camomile, canola, caraway, carnauba, castor, cinnamon, cocoa butter, coconut, cod liver, coffee, corn, cotton seed, emu, eucalyptus, evening primrose, fish, flaxseed, geraniol, gourd, grape seed, hazel nut, hyssop, isopropyl myristate, jojoba, kukui nut, lavandin, lavender, lemon, litsea cubeba, macademia nut, mallow, mango seed, meadowfoam seed, mink, nutmeg, olive, orange, orange roughy, palm, palm kernel, peach kernel, peanut, poppy seed, pumpkin seed, rapeseed, rice bran, rosemary, safflower, sandalwood, sasquana, savoury, sea buckthorn, sesame, shea butter, silicone, soybean, sunflower, tea tree, thistle, tsubaki, vetiver, walnut, and wheat germ oils. Exemplary synthetic oils include, but are not limited to, butyl stearate, caprylic triglyceride, capric triglyceride, cyclomethicone, diethyl sebacate, dimethicone 360, isopropyl myristate, mineral oil, octyldodecanol, oleyl alcohol, silicone oil, and mixtures thereof.

[0260] Liquid dosage forms for oral and parenteral administration include pharmaceutically acceptable emulsions, microemulsions, solutions, suspensions, syrups and elixirs. In addition to the active ingredients, the liquid dosage forms may comprise inert diluents commonly used in the art such as, for example, water or other solvents, solubilizing agents and emulsifiers such as ethyl alcohol, isopropyl alcohol, ethyl carbonate, ethyl acetate, benzyl alcohol, benzyl benzoate, propylene glycol, 1,3-butylene glycol, dimethylformamide, oils (e.g., cottonseed, groundnut, corn, germ, olive, castor, and sesame oils), glycerol, tetrahydrofurfuryl alcohol, polyethylene glycols and fatty acid esters of sorbitan, and mixtures thereof. Besides inert diluents, the oral compositions can include adjuvants such as wetting agents, emulsifying and suspending agents, sweetening, flavoring, and perfuming agents. In certain embodiments for parenteral administration, the conjugates described herein are mixed with solubilizing agents such as Cremophor®, alcohols, oils, modified oils, glycols, polysorbates, cyclodextrins, polymers, and mixtures thereof.

[0261] Injectable preparations, for example, sterile injectable aqueous or oleaginous suspensions can be formulated according to the known art using suitable dispersing or wetting agents and suspending agents. The sterile injectable preparation can be a sterile injectable solution, suspension, or emulsion in a nontoxic parenterally acceptable diluent or solvent, for example, as a solution in 1,3-butanediol. Among the acceptable vehicles and solvents that can be employed are water, Ringer's solution, U.S.P., and isotonic sodium chloride solution. In addition, sterile, fixed oils are conventionally employed as a solvent or suspending medium. For this purpose any bland fixed oil can be employed including synthetic mono- or di-glycerides. In addition, fatty acids such as oleic acid are used in the preparation of injectables.

[0262] The injectable formulations can be sterilized, for example, by filtration through a bacterial-retaining filter, or by incorporating sterilizing agents in the form of sterile solid compositions which can be dissolved or dispersed in sterile water or other sterile injectable medium prior to use.

[0263] In order to prolong the effect of a drug, it is often desirable to slow the absorption of the drug from subcutaneous or intramuscular injection. This can be accomplished by the use of a liquid suspension of crystalline or amorphous material with poor water solubility. The rate of absorption of the drug then depends upon its rate of dissolution, which, in turn, may depend upon crystal size and crystalline form. Alternatively, delayed absorption of a parenterally administered drug form may be accomplished by dissolving or suspending the drug in an oil vehicle.

[0264] Compositions for rectal or vaginal administration are typically suppositories which can be prepared by mixing the conjugates described herein with suitable non-irritating excipients or carriers such as cocoa butter, polyethylene glycol, or a suppository wax which are solid at ambient temperature but liquid at body temperature and therefore melt in the rectum or vaginal cavity and release the active ingredient.

[0265] Solid dosage forms for oral administration include capsules, tablets, pills, powders, and granules. In such solid dosage forms, the active ingredient is mixed with at least one inert, pharmaceutically acceptable excipient or carrier such as sodium citrate or dicalcium phosphate and/or (a) fillers or extenders such as starches, lactose, sucrose, glucose, mannitol, and silicic acid, (b) binders such as, for example, carboxymethylcellulose, alginates, gelatin, polyvinylpyrrolidinone, sucrose, and acacia, (c) humectants such as glycerol, (d) disintegrating agents such as agar, calcium carbonate, potato or tapioca starch, alginic acid, certain silicates, and sodium carbonate, (e) solution retarding agents such as paraffin, (f) absorption accelerators such as quaternary ammonium compounds, (g) wetting agents such as, for example, cetyl alcohol and glycerol monostearate, (h) absorbents such as kaolin and bentonite clay, and (i) lubricants such as talc, calcium stearate, magnesium stearate, solid polyethylene glycols, sodium lauryl sulfate, and mixtures thereof. In the case of capsules, tablets, and pills, the dosage form may include a buffering agent.

[0266] Solid compositions of a similar type can be employed as fillers in soft and hard-filled gelatin capsules using such excipients as lactose or milk sugar as well as high molecular weight polyethylene glycols and the like. The solid dosage forms of tablets, dragees, capsules, pills, and granules can be prepared with coatings and shells such as enteric coatings and other coatings well known in the art of pharmacology. They may optionally comprise opacifying agents and can be of a composition that they release the active ingredient(s) only, or preferentially, in a certain part of the intestinal tract, optionally, in a delayed manner. Examples of encapsulating compositions which can be used include polymeric substances and waxes. Solid compositions of a similar type can be employed as fillers in soft and hard-filled gelatin capsules using such excipients as lactose or milk sugar as well as high molecular weight polethylene glycols and the like.

[0267] The active ingredient can be in a micro-encapsulated form with one or more excipients as noted above. The solid dosage forms of tablets, dragees, capsules, pills, and granules can be prepared with coatings and shells such as enteric coatings, release controlling coatings, and other coatings well known in the pharmaceutical formulating art. In such solid dosage forms the active ingredient can be admixed with at least one inert diluent such as sucrose, lactose, or starch. Such dosage forms may comprise, as is normal practice, additional substances other than inert diluents, e.g., tableting lubricants and other tableting aids such a magnesium stearate and microcrystalline cellulose. In the case of capsules, tablets and pills, the dosage forms may comprise buffering agents. They may optionally comprise opacifying agents and can be of a composition that they release the active ingredient(s) only, or preferentially, in a certain part of the intestinal tract, optionally, in a delayed manner. Examples of encapsulating agents which can be used include polymeric substances and waxes.

[0268] Dosage forms for topical and/or transdermal administration of an agent (e.g., PD-1 blockade, JAK/STAT inhibitor, etc.) described herein may include ointments, pastes, creams, lotions, gels, powders, solutions, sprays, inhalants, and/or patches. Generally, the active ingredient is admixed under sterile conditions with a pharmaceutically acceptable carrier or excipient and/or any needed preservatives and/or buffers as can be required.

[0269] Additionally, the present disclosure contemplates the use of transdermal patches, which often have the added advantage of providing controlled delivery of an active ingredient to the body. Such dosage forms can be prepared, for example, by dissolving and/or dispensing the active ingredient in the proper medium. Alternatively or additionally, the rate can be controlled by either providing a rate controlling membrane and/or by dispersing the active ingredient in a polymer matrix and/or gel.

[0270] Suitable devices for use in delivering intradermal pharmaceutical compositions described herein include short needle devices. Intradermal compositions can be administered by devices which limit the effective penetration length of a needle into the skin. Alternatively or additionally, conventional syringes can be used in the classical mantoux method of intradermal administration.

[0271] Jet injection devices which deliver liquid formulations to the dermis via a liquid jet injector and/or via a needle which pierces the stratum corneum and produces ajet which reaches the dermis are suitable. Ballistic powder/particle delivery devices which use compressed gas to accelerate the compound in powder form through the outer layers of the skin to the dermis are suitable.

[0272] Formulations suitable for topical administration include, but are not limited to, liquid and/or semi-liquid preparations such as liniments, lotions, oil-in-water and/or water-in-oil emulsions such as creams, ointments, and/or pastes, and/or solutions and/or suspensions. Topically administrable formulations may, for example, comprise from about 1% to about 10% (w/w) active ingredient, although the concentration of the active ingredient can be as high as the solubility limit of the active ingredient in the solvent. Formulations for topical administration may further comprise one or more of the additional ingredients described herein.

[0273] A pharmaceutical composition described herein can be prepared, packaged, and/or sold in a formulation suitable for pulmonary administration via the buccal cavity. Such a formulation may comprise dry particles which comprise the active ingredient and which have a diameter in the range from about 0.5 to about 7 nanometers, or from about 1 to about 6 nanometers. Such compositions are conveniently in the form of dry powders for administration using a device comprising a dry powder reservoir to which a stream of propellant can be directed to disperse the powder and/or using a self-propelling solvent/powder dispensing container such as a device comprising the active ingredient dissolved and/or suspended in a low-boiling propellant in a sealed container. Such powders comprise particles wherein at least 98% of the particles by weight have a diameter greater than 0.5 nanometers and at least 95% of the particles by number have a diameter less than 7 nanometers. Alternatively, at least 95% of the particles by weight have a diameter greater than 1 nanometer and at least 90% of the particles by number have a diameter less than 6 nanometers. Dry powder compositions may include a solid fine powder diluent such as sugar and are conveniently provided in a unit dose form.

[0274] Low boiling propellants generally include liquid propellants having a boiling point of below 65° F. at atmospheric pressure. Generally the propellant may constitute 50 to 99.9% (w/w) of the composition, and the active ingredient may constitute 0.1 to 20% (w/w) of the composition. The propellant may further comprise additional ingredients such as a liquid non-ionic and/or solid anionic surfactant and/or a solid diluent (which may have a particle size of the same order as particles comprising the active ingredient).

[0275] Pharmaceutical compositions described herein formulated for pulmonary delivery may provide the active ingredient in the form of droplets of a solution and/or suspension. Such formulations can be prepared, packaged, and/or sold as aqueous and/or dilute alcoholic solutions and/or suspensions, optionally sterile, comprising the active ingredient, and may conveniently be administered using any nebulization and/or atomization device. Such formulations may further comprise one or more additional ingredients including, but not limited to, a flavoring agent such as saccharin sodium, a volatile oil, a buffering agent, a surface active agent, and/or a preservative such as methylhydroxybenzoate. The droplets provided by this route of administration may have an average diameter in the range from about 0.1 to about 200 nanometers.

[0276] Formulations described herein as being useful for pulmonary delivery are useful for intranasal delivery of a pharmaceutical composition described herein. Another formulation suitable for intranasal administration is a coarse powder comprising the active ingredient and having an average particle from about 0.2 to 500 micrometers. Such a formulation is administered by rapid inhalation through the nasal passage from a container of the powder held close to the nares.

[0277] Formulations for nasal administration may, for example, comprise from about as little as 0.1% (w/w) to as much as 100% (w/w) of the active ingredient, and may comprise one or more of the additional ingredients described herein. A pharmaceutical composition described herein can be prepared, packaged, and/or sold in a formulation for buccal administration. Such formulations may, for example, be in the form of tablets and/or lozenges made using conventional methods, and may contain, for example, 0.1 to 20% (w/w) active ingredient, the balance comprising an orally dissolvable and/or degradable composition and, optionally, one or more of the additional ingredients described herein. Alternately, formulations for buccal administration may comprise a powder and/or an aerosolized and/or atomized solution and/or suspension comprising the active ingredient. Such powdered, aerosolized, and/or aerosolized formulations, when dispersed, may have an average particle and/or droplet size in the range from about 0.1 to about 200 nanometers, and may further comprise one or more of the additional ingredients described herein.

[0278] A pharmaceutical composition described herein can be prepared, packaged, and/or sold in a formulation for ophthalmic administration. Such formulations may, for example, be in the form of eye drops including, for example, a 0.1-1.0% (w/w) solution and/or suspension of the active ingredient in an aqueous or oily liquid carrier or excipient. Such drops may further comprise buffering agents, salts, and/or one or more other of the additional ingredients described herein. Other opthalmically-administrable formulations which are useful include those which comprise the active ingredient in microcrystalline form and/or in a liposomal preparation. Ear drops and/or eye drops are also contemplated as being within the scope of this disclosure.

[0279] Although the descriptions of pharmaceutical compositions provided herein are principally directed to pharmaceutical compositions which are suitable for administration to humans, it will be understood by the skilled artisan that such compositions are generally suitable for administration to animals of all sorts. Modification of pharmaceutical compositions suitable for administration to humans in order to render the compositions suitable for administration to various animals is well understood, and the ordinarily skilled veterinary pharmacologist can design and/or perform such modification with ordinary experimentation.

[0280] FDA-approved drugs provided herein are typically formulated in dosage unit form for ease of administration and uniformity of dosage. It will be understood, however, that the total daily usage of the agents described herein will be decided by a physician within the scope of sound medical judgment. The specific therapeutically effective dose level for any particular subject or organism will depend upon a variety of factors including the disease being treated and the severity of the disorder; the activity of the specific active ingredient employed; the specific composition employed; the age, body weight, general health, sex, and diet of the subject; the time of administration, route of administration, and rate of excretion of the specific active ingredient employed; the duration of the treatment; drugs used in combination or coincidental with the specific active ingredient employed; and like factors well known in the medical arts.

[0281] The agents and compositions provided herein can be administered by any route, including enteral (e.g., oral), parenteral, intravenous, intramuscular, intra-arterial, intramedullary, intrathecal, subcutaneous, intraventricular, transdermal, interdermal, rectal, intravaginal, intraperitoneal, topical (as by powders, ointments, creams, and/or drops), mucosal, nasal, bucal, sublingual; by intratracheal instillation, bronchial instillation, and/or inhalation; and/or as an oral spray, nasal spray, and/or aerosol. Specifically contemplated routes are oral administration, intravenous administration (e.g., systemic intravenous injection), regional administration via blood and/or lymph supply, and/or direct administration to an affected site. In general, the most appropriate route of administration will depend upon a variety of factors including the nature of the agent (e.g., its stability in the environment of the gastrointestinal tract), and/or the condition of the subject (e.g., whether the subject is able to tolerate oral administration). In certain embodiments, the agent or pharmaceutical composition described herein is suitable for topical administration to the eye of a subject.

[0282] The exact amount of an agent required to achieve an effective amount will vary from subject to subject, depending, for example, on species, age, and general condition of a subject, severity of the side effects or disorder, identity of the particular agent, mode of administration, and the like. An effective amount may be included in a single dose (e.g., single oral dose) or multiple doses (e.g., multiple oral doses). In certain embodiments, when multiple doses are administered to a subject or applied to a tissue or cell, any two doses of the multiple doses include different or substantially the same amounts of an agent (e.g., PD-1 blockade, JAK/STAT inhibitor, etc.) described herein.

[0283] As noted elsewhere herein, an agent of the disclosure may be administered via a number of routes of administration, including but not limited to: subcutaneous, intravenous, intrathecal, intramuscular, intranasal, oral, transepidermal, parenteral, by inhalation, or intracerebroventricular.

[0284] The term “injection” or “injectable” as used herein refers to a bolus injection (administration of a discrete amount of an agent for raising its concentration in a bodily fluid), slow bolus injection over several minutes, or prolonged infusion, or several consecutive injections/infusions that are given at spaced apart intervals.

[0285] In some embodiments of the present disclosure, a formulation as herein defined is administered to the subject by bolus administration.

[0286] The FDA-approved drug or other therapy is administered to the subject in an amount sufficient to achieve a desired effect at a desired site (e.g., reduction of cancer size, cancer cell abundance, symptoms, etc.) determined by a skilled clinician to be effective. In some embodiments of the disclosure, the agent is administered at least once a year. In other embodiments of the disclosure, the agent is administered at least once a day. In other embodiments of the disclosure, the agent is administered at least once a week. In some embodiments of the disclosure, the agent is administered at least once a month.

[0287] Additional exemplary doses for administration of an agent of the disclosure to a subject include, but are not limited to, the following: 1-20 mg/kg/day, 2-15 mg/kg/day, 5-12 mg/kg/day, 10 mg/kg/day, 1-500 mg/kg/day, 2-250 mg/kg/day, 5-150 mg/kg/day, 20-125 mg/kg/day, 50-120 mg/kg/day, 100 mg/kg/day, at least 10 μg/kg/day, at least 100 μg/kg/day, at least 250 μg/kg/day, at least 500 μg/kg/day, at least 1 mg/kg/day, at least 2 mg/kg/day, at least 5 mg/kg/day, at least 10 mg/kg/day, at least 20 mg/kg/day, at least 50 mg/kg/day, at least 75 mg/kg/day, at least 100 mg/kg/day, at least 200 mg/kg/day, at least 500 mg/kg/day, at least 1 g/kg/day, and a therapeutically effective dose that is less than 500 mg/kg/day, less than 200 mg/kg/day, less than 100 mg/kg/day, less than 50 mg/kg/day, less than 20 mg/kg/day, less than 10 mg/kg/day, less than 5 mg/kg/day, less than 2 mg/kg/day, less than 1 mg/kg/day, less than 500 μg/kg/day, and less than 500 μg/kg/day.

[0288] In certain embodiments, when multiple doses are administered to a subject or applied to a tissue or cell, the frequency of administering the multiple doses to the subject or applying the multiple doses to the tissue or cell is three doses a day, two doses a day, one dose a day, one dose every other day, one dose every third day, one dose every week, one dose every two weeks, one dose every three weeks, or one dose every four weeks. In certain embodiments, the frequency of administering the multiple doses to the subject or applying the multiple doses to the tissue or cell is one dose per day. In certain embodiments, the frequency of administering the multiple doses to the subject or applying the multiple doses to the tissue or cell is two doses per day. In certain embodiments, the frequency of administering the multiple doses to the subject or applying the multiple doses to the tissue or cell is three doses per day. In certain embodiments, when multiple doses are administered to a subject or applied to a tissue or cell, the duration between the first dose and last dose of the multiple doses is one day, two days, four days, one week, two weeks, three weeks, one month, two months, three months, four months, six months, nine months, one year, two years, three years, four years, five years, seven years, ten years, fifteen years, twenty years, or the lifetime of the subject, tissue, or cell. In certain embodiments, the duration between the first dose and last dose of the multiple doses is three months, six months, or one year. In certain embodiments, the duration between the first dose and last dose of the multiple doses is the lifetime of the subject, tissue, or cell. In certain embodiments, a dose (e.g., a single dose, or any dose of multiple doses) described herein includes independently between 0.1 μg and 1 μg, between 0.001 mg and 0.01 mg, between 0.01 mg and 0.1 mg, between 0.1 mg and 1 mg, between 1 mg and 3 mg, between 3 mg and 10 mg, between 10 mg and 30 mg, between 30 mg and 100 mg, between 100 mg and 300 mg, between 300 mg and 1,000 mg, or between 1 g and 10 g, inclusive, of an agent (e.g., a PD-1 blockade, JAK/STAT inhibitor, etc.) described herein.

[0289] In certain embodiments, a dose described herein includes independently between 1 mg and 3 mg, inclusive, of an agent (e.g., a PD-1 blockade, JAK/STAT inhibitor, etc.) described herein. In certain embodiments, a dose described herein includes independently between 3 mg and 10 mg, inclusive, of an agent (e.g., a PD-1 blockade, JAK/STAT inhibitor, etc.) described herein. In certain embodiments, a dose described herein includes independently between 10 mg and 30 mg, inclusive, of an agent (e.g., a PD-1 blockade, JAK/STAT inhibitor, etc.) described herein. In certain embodiments, a dose described herein includes independently between 30 mg and 100 mg, inclusive, of an agent (e.g., a PD-1 blockade, JAK/STAT inhibitor, etc.) described herein.

[0290] It will be appreciated that dose ranges as described herein provide guidance for the administration of provided pharmaceutical compositions to an adult. The amount to be administered to, for example, a child or an adolescent can be determined by a medical practitioner or person skilled in the art and can be lower or the same as that administered to an adult. In certain embodiments, a dose described herein is a dose to an adult human whose body weight is 70 kg.

[0291] It will be also appreciated that an agent (e.g., a PD-1 blockade, JAK/STAT inhibitor, etc.) or composition, as described herein, can be administered in combination with one or more additional pharmaceutical agents (e.g., therapeutically and/or prophylactically active agents), which are different from the agent or composition and may be useful as, e.g., combination therapies. The agents or compositions can be administered in combination with additional pharmaceutical agents that improve their activity (e.g., activity (e.g., potency and/or efficacy) in treating a disease in a subject in need thereof, in preventing a disease in a subject in need thereof, in reducing the risk of developing a disease in a subject in need thereof, in inhibiting the replication of a virus, in killing a virus, etc. in a subject or cell. In certain embodiments, a pharmaceutical composition described herein including an agent (e.g., a PD-1 blockade, JAK/STAT inhibitor, etc.) described herein and an additional pharmaceutical agent shows a synergistic effect that is absent in a pharmaceutical composition including one of the agent and the additional pharmaceutical agent, but not both.

[0292] In some embodiments of the disclosure, a therapeutic agent distinct from a first therapeutic agent of the disclosure is administered prior to, in combination with, at the same time, or after administration of the agent of the disclosure. In some embodiments, the second therapeutic agent is selected from the group consisting of a chemotherapeutic, an antioxidant, an anti-inflammatory agent, an antimicrobial, a steroid, etc.

[0293] The agent or composition can be administered concurrently with, prior to, or subsequent to one or more additional pharmaceutical agents, which may be useful as, e.g., combination therapies. Pharmaceutical agents include therapeutically active agents. Pharmaceutical agents also include prophylactically active agents. Pharmaceutical agents include small organic molecules such as drug compounds (e.g., compounds approved for human or veterinary use by the U.S. Food and Drug Administration as provided in the Code of Federal Regulations (CFR)), peptides, proteins, carbohydrates, monosaccharides, oligosaccharides, polysaccharides, nucleoproteins, mucoproteins, lipoproteins, synthetic polypeptides or proteins, small molecules linked to proteins, glycoproteins, steroids, nucleic acids, DNAs, RNAs, nucleotides, nucleosides, oligonucleotides, antisense oligonucleotides, lipids, hormones, vitamins, and cells. In certain embodiments, the additional pharmaceutical agent is a pharmaceutical agent useful for treating and/or preventing a disease described herein. Each additional pharmaceutical agent may be administered at a dose and/or on a time schedule determined for that pharmaceutical agent. The additional pharmaceutical agents may also be administered together with each other and/or with the agent or composition described herein in a single dose or administered separately in different doses. The particular combination to employ in a regimen will take into account compatibility of the agent described herein with the additional pharmaceutical agent(s) and/or the desired therapeutic and/or prophylactic effect to be achieved. In general, it is expected that the additional pharmaceutical agent(s) in combination be utilized at levels that do not exceed the levels at which they are utilized individually. In some embodiments, the levels utilized in combination will be lower than those utilized individually.

[0294] The additional pharmaceutical agents include, but are not limited to, additional agents (e.g., a PD-1 blockade, JAK/STAT inhibitor, etc.).

[0295] Dosages for a particular agent of the instant disclosure may be determined empirically in individuals who have been given one or more administrations of the agent.

[0296] Administration of an agent of the present disclosure can be continuous or intermittent, depending, for example, on the recipient's physiological condition, whether the purpose of the administration is therapeutic or prophylactic, and other factors known to skilled practitioners. The administration of an agent may be essentially continuous over a preselected period of time or may be in a series of spaced doses.

[0297] Guidance regarding particular dosages and methods of delivery is provided in the literature; see, for example, U.S. Pat. Nos. 4,657,760; 5,206,344; or 5,225,212. It is within the scope of the instant disclosure that different formulations will be effective for different treatments and different disorders, and that administration intended to treat a specific organ or tissue may necessitate delivery in a manner different from that to another organ or tissue. Moreover, dosages may be administered by one or more separate administrations, or by continuous infusion. For repeated administrations over several days or longer, depending on the condition, the treatment is sustained until a desired suppression of disease symptoms occurs. However, other dosage regimens may be useful. The progress of this therapy is easily monitored by conventional techniques and assays.

### Patient Monitoring

[0298] The disease state or treatment of a patient having cHL, PMBL, or other cancer or disease is characterized by assessing alterations in polynucleotide(s) encoding one or more of ACTbeta, ADGRG6, ARID1A, B2M, CIITA, CSF2RB, DNAH12, EEF1A1, ETV6, EZH2, GNA13, HLA-B, HIST2H2BE, HIST1H1E, JAK2, IGLL5, IKBKB, IRF2BP2, IKZF3, IL4R, NFKBIA, NFKBIE, RBM38, SOCS1, PD-L1, PD-L2, REL, SOCS6, STAT6, TNFAIP3, TP53, XPO1, and ZNF217, and/or at a chromosomal locus selected from one or more of 2p, 2p15, 2q. 2p16.1, 5p, 5q, 5p15.33, 6p21.33, 7p, 7q, 9p, 9q, 9p24.1, 1p36.32, 1q41, 6p21.32, 6q, 6q12, 6q23.3, 15q15.3, 16p13.3, 18q22.2, 21q, and 22q13.2. In some embodiments, patient therapy can be monitored using the methods and compositions of this invention (e.g., SNP probe sets described herein). In one embodiment, the response of a patient to a treatment can be monitored using the methods and compositions of this invention. Such monitoring may be useful, for example, in assessing the efficacy of a particular treatment in a patient. Treatments amenable to monitoring using the methods of the invention include, but are not limited to, chemotherapy, radiotherapy, immunotherapy, and surgery.

### Computer Systems

[0299] The present disclosure also relates to a computer system involved in carrying out the methods of the disclosure (e.g., methods to calculate molecular tumor burden for a subject and/or determine the presence or absence of various alterations described herein).

[0300] A computer system (or digital device) may be used to receive, transmit, display and/or store results, analyze the results, and/or produce a report of the results and analysis. A computer system may be understood as a logical apparatus that can read instructions from media (e.g. software) and/or network port (e.g. from the internet), which can optionally be connected to a server having fixed media. A computer system may comprise one or more of a CPU, disk drives, input devices such as keyboard and/or mouse, and a display (e.g. a monitor). Data communication, such as transmission of instructions or reports, can be achieved through a communication medium to a server at a local or a remote location. The communication medium can include any means of transmitting and/or receiving data. For example, the communication medium can be a network connection, a wireless connection, or an internet connection. Such a connection can provide for communication over the World Wide Web. It is envisioned that data relating to the present disclosure can be transmitted over such networks or connections (or any other suitable means for transmitting information, including but not limited to mailing a physical report, such as a print-out) for reception and/or for review by a receiver. The receiver can be but is not limited to an individual, or electronic system (e.g. one or more computers, and/or one or more servers).

[0301] In some embodiments, the computer system may comprise one or more processors. Processors may be associated with one or more controllers, calculation units, and/or other units of a computer system, or implanted in firmware as desired. If implemented in software, the routines may be stored in any computer readable memory such as in RAM, ROM, flash memory, a magnetic disk, a laser disk, or other suitable storage medium. Likewise, this software may be delivered to a computing device via any known delivery method including, for example, over a communication channel such as a telephone line, the internet, a wireless connection, etc., or via a transportable medium, such as a computer readable disk, flash drive, etc. The various steps may be implemented as various blocks, operations, tools, modules, and techniques which, in turn, may be implemented in hardware, firmware, software, or any combination of hardware, firmware, and/or software. When implemented in hardware, some or all of the blocks, operations, techniques, etc. may be implemented in, for example, a custom integrated circuit (IC), an application specific integrated circuit (ASIC), a field programmable logic array (FPGA), a programmable logic array (PLA), etc.

[0302] A client-server, relational database architecture can be used in embodiments of the disclosure. A client-server architecture is a network architecture in which each computer or process on the network is either a client or a server. Server computers are typically powerful computers dedicated to managing disk drives (file servers), printers (print servers), or network traffic (network servers). Client computers include PCs (personal computers) or workstations on which users run applications, as well as example output devices as disclosed herein. Client computers rely on server computers for resources, such as files, devices, and even processing power. In some embodiments of the disclosure, the server computer handles all of the database functionality. The client computer can have software that handles all the front-end data management and can also receive data input from users.

[0303] A machine readable medium which may comprise computer-executable code may take many forms, including but not limited to, a tangible storage medium, a carrier wave medium or physical transmission medium. Non-volatile storage media include, for example, optical or magnetic disks, such as any of the storage devices in any computer(s) or the like, such as may be used to implement the databases, etc. shown in the drawings. Volatile storage media include dynamic memory, such as main memory of such a computer platform. Tangible transmission media include coaxial cables; copper wire and fiber optics, including the wires that comprise a bus within a computer system. Carrier-wave transmission media may take the form of electric or electromagnetic signals, or acoustic or light waves such as those generated during radio frequency (RF) and infrared (IR) data communications. Common forms of computer-readable media therefore include for example: a floppy disk, a flexible disk, hard disk, magnetic tape, any other magnetic medium, a CD-ROM, DVD or DVD-ROM, any other optical medium, punch cards paper tape, any other physical storage medium with patterns of holes, a RAM, a ROM, a PROM and EPROM, a FLASH-EPROM, any other memory chip or cartridge, a carrier wave transporting data or instructions, cables or links transporting such a carrier wave, or any other medium from which a computer may read programming code and/or data. Many of these forms of computer readable media may be involved in carrying one or more sequences of one or more instructions to a processor for execution.

[0304] The subject computer-executable code can be executed on any suitable device which may comprise a processor, including a server, a PC, or a mobile device such as a smartphone or tablet. Any controller or computer optionally includes a monitor, which can be a cathode ray tube (“CRT”) display, a flat panel display (e.g., active matrix liquid crystal display, liquid crystal display, etc.), or others. Computer circuitry is often placed in a box, which includes numerous integrated circuit chips, such as a microprocessor, memory, interface circuits, and others. The box also optionally includes a hard disk drive, a floppy disk drive, a high capacity removable drive such as a writeable CD-ROM, and other common peripheral elements. Inputting devices such as a keyboard, mouse, or touch-sensitive screen, optionally provide for input from a user. The computer can include appropriate software for receiving user instructions, either in the form of user input into a set of parameter fields, e.g., in a GUI, or in the form of preprogrammed instructions, e.g., preprogrammed for a variety of different specific operations.

[0305] A computer can transform data into various formats for display. A graphical presentation of the results of a calculation can be displayed on a monitor, display, or other visualizable medium (e.g., a printout). In some embodiments, data or the results of a calculation may be presented in an auditory form.

[0306] In aspects, software used to analyze the data can include code that applies an algorithm to the analysis of the results. The software also can also use input data (e.g., sequence data or biochip data) to characterize cHL or PMBL.

### Kits

[0307] The disclosure also provides kits for use in characterizing and/or treating a classical Hodgkin's lymphoma (cHL) and/or primary mediastinal B-cell lymphoma (PMBL). Kits of the instant disclosure may include one or more containers comprising an agent for characterization of a cHL and/or PMBL and/or for treatment of the same. In some embodiments, the kits further include instructions for use in accordance with the methods of this disclosure. In some embodiments, these instructions comprise a description of use of the agent to characterize a neoplasia and/or use of the agent (e.g., an immunotherapeutic agent, such as a PD-1 blockade) for treatment of a cHL or PMBL. The kit may further comprise a description of how to analyze and/or interpret data.

[0308] Instructions supplied in the kits of the instant disclosure are typically written instructions on a label or package insert (e.g., a paper sheet included in the kit), but machine-readable instructions (e.g., instructions carried on a magnetic or optical storage disk) are also acceptable. Instructions may be provided for practicing any of the methods described herein.

[0309] The kits of this disclosure are in suitable packaging. Suitable packaging includes, but is not limited to, vials, bottles, jars, flexible packaging (e.g., sealed Mylar or plastic bags), and the like. Kits may optionally provide additional components such as buffers and interpretive information. Normally, the kit comprises a container and a label or package insert(s) on or associated with the container.

[0310] The practice of the present invention employs, unless otherwise indicated, conventional techniques of molecular biology (including recombinant techniques), microbiology, cell biology, biochemistry and immunology, which are well within the purview of the person of ordinary skill. Such techniques are explained fully in the literature, such as, “Molecular Cloning: A Laboratory Manual”, second edition (Sambrook, 1989); “Oligonucleotide Synthesis” (Gait, 1984); “Animal Cell Culture” (Freshney, 1987); “Methods in Enzymology” “Handbook of Experimental Immunology” (Weir, 1996); “Gene Transfer Vectors for Mammalian Cells” (Miller and Calos, 1987); “Current Protocols in Molecular Biology” (Ausubel, 1987); “PCR: The Polymerase Chain Reaction”, (Mullis, 1994); “Current Protocols in Immunology” (Coligan, 1991). These techniques are applicable to the production of the polynucleotides and polypeptides of this invention, and, as such, may be considered in making and practicing this invention. Particularly useful techniques for particular embodiments will be discussed in the sections that follow.

[0311] The following examples are put forth so as to provide those of ordinary skill in the art with a complete disclosure and description of how to make and use the assay, screening, and therapeutic methods of this invention, and are not intended to limit the scope of what the inventors regard as their invention.

### EXAMPLES

### Example 1: Genetic Signatures of cHL

[0312] To define genetic mechanisms of response and resistance to PD-1 blockade and identify complementary treatment targets, whole-exome sequencing of flow cytometry-sorted Hodgkin Reed-Sternberg cells from 23 excisional biopsies of newly diagnosed classical Hodgkin lymphomas (cHLs), including 8 Epstein-Barr virus-positive (EBV+) tumors was performed. Significantly mutated cancer candidate genes were identified, as well as somatic copy number alterations and structural variations, including translocations, and characterized their contribution to immune evasion mechanisms and aberrant signaling pathways (FIG. 2A). EBV− cHLs had a higher incidence of genetic alterations in the NF-κB and MHC class I antigen presentation pathways. In this young cHL cohort (median age, 26 years), a predominant mutational signature of spontaneous deamination of 5′-C-phosphate-G-3′ (CpGs) (“Aging”) was identified, in addition to APOBEC, activation-induced cytidine deaminase, and microsatellite instability-associated hypermutation. The tumor mutational burden in EBV-cHLs was among the highest reported, similar to that of carcinogen-induced tumors. The high tumor mutational burden, microsatellite instability-associated hypermutation, and newly identified genetic alterations represent additional potential bases for predicting the efficacy of PD-1 blockade in cHL.

### Example 2: Genetic Signatures of Primary Mediastinal B-Cell Lymphoma (PMBL)

[0313] PMBLs share clinical, transcriptional, and molecular features with cHL, including constitutive activation of NF-κB, JAK/STAT signaling, and PD-1-mediated immune evasion. The recurrent genetic alterations in 37 newly diagnosed PMBLs were analyzed (FIG. 2B). Recurrent drivers in PMBL included known and newly identified components of the JAK/STAT and NF-κB signaling pathways and frequent beta 2 microglobulin (B2M) alterations that limit MHC class I expression, as in cHL. PMBL also exhibited frequent, newly identified driver mutations in ZNF217 and an additional epigenetic modifier, EZH2. In PMBL, several previously uncharacterized molecular features were identified that likely increase sensitivity to PD-1 blockade, including high tumor mutational burden, microsatellite instability, and an APOBEC mutational signature. The shared genetic features in PMBL and cHL provide a framework for analyzing the mechanism of action of PD-1 blockade in these related lymphoid malignancies.

### Example 3: Development and Preparation of a Custom Targeted Sequencing Panel

[0314] A custom targeted sequencing panel (see Tables 1 and 2, and SEQ ID NOs: 1-1502) was developed that includes 34 recurrently mutated genes candidate cancer genes (CCGs), 6 somatic copy number alterations (SCNAs) (1p36.32, 2p15, 6p21, 6q23.3, 9p24.1, 15q15.3), and 3 (9p24, CIITA and ETV6), and 3 (9p24, CIITA and ETV6) structural variants (SVs, chromosomal translocations) associated with cHL and/or the related lymphoid malignancy, PMBL (FIGS. 2A-2C). The coding portions of the cancer candidate genes from cHL and PMBL were tiled in their entirety. Focal copy number alteration regions identified in cHL and/or PMBL by GISTIC2.0 were tiled with 120 bp SNP probes at a density of ˜1 probe every 200 kb (but no less than 12 probes per copy number alteration). To optimize assay performance, SNPs residing in exonic regions with the alignment scores (ENCODE Mappability) of 1 were prioritized, meaning that the probe sequences aligned to the genome only once. Additionally, preference was given to SNPs with higher minor allele population frequency as reported in gnomAD database. All included SNPs were required to have a population frequency>10% and an alignment score>0.5. Finally, high-quality SNPs that were included in the Affymetrix Human SNP Array 6.0 were prioritized. Structural variant regions were selected that contained recurrent breakpoints identified in cHL or PMBL. SV regions containing recurrent breakpoints in cHL or PMBL were tiled at 2× to ensure selection across the fusion regions. The ˜300 kb targeted sequencing panel also included probes spanning mismatch repair (MMR) genes (MSH2, MSH3, MSH6, MLH1, EXO1, PMS2, POLD1, and POLE) and additional probes to identify microsatellite instability (MSI) and passanger regions to characterize tumor mutational burden (TMB)(FIG. 3). The targeted sequencing panel also included probes covering 2 major genes (LMP1 and EBNA1) in six strains of EBV, of particular importance in cHL (FIG. 3; Table 2): Human gammaherpesvirus 4 (NCBI Ref. Seq. Accession No. NC_007605.1), Human herpesvirus 4 strain GD1 (GenBank Accession No. AY961628.3), Human herpesvirus 4 strain GD2 (GenBank Accession No. HQ020558.1), Human herpesvirus 4 strain HKNPC1 (GenBank Accession No. JQ009376.2), Human herpesvirus 4 strain AG876 (GenBank Accession No. DQ279927.1), and Epstein-Barr virus (EBV) strain B95-8 (GenBank Accession No. V01555.2).

[0315] Probe (alternatively, “bait”) design was optimized using the TWIST DNA chemistry which produced high-fidelity double-stranded DNA probes with increased specificity and uniform target enrichment. TWIST-designed probes are associated with increased sequencing depth due to the low frequency of dropout regions. The ctDNA libraries also contained double-stranded unique molecular indices (UMI) with dual barcoding, which reduced false positives, enables duplex consensus calling and results in dramatically improved error correction.

[0316] The strategy for library synthesis and initial qc of the targeted sequencing panel is illustrated in FIG. 23.

[0317] The detailed panel sequences are provided in the Sequence Listing as SEQ ID NOs: 1-1430 and are described in Tables 1. In Table 1, targeted regions are identified by gene symbol (e.g. TNFRSF14), copy number (e.g. 1p36.32), microsatellite instability (e.g. MSI), tumor mutation burden (TMB, e.g. TMBREGION), and/or intergenic regions to detect structural variants (SV). In Table 1, for each region, position on human reference genome build (hg19) by chromosome, boundaries indicated by start and stop, as well as the baited region size in basepairs are indicated.

[0318] The sequences of 72 probes designed to detect EBV viral genome baited for 2 genes (LMP1 and EBNA1) from six strains (NC-007605, GD1, GD2, AG876, HKNPC1, B95) of EBV are included in the Sequence Listing as SEQ ID NOs: 1431-1502. The reference sequences used to design the start and stop positions of the 120 bp probes are listed in Table 2.

TABLE 1
Bait set excluding EBV baits. In the table p.start and p.stop together indicate the
span of a site on the indicated chromosome targeted by the bait with a sequence
corresponding to the indicated SEQ ID NO. The table indicates the variant targeted by
each listed bait. Some probes are not designated as targeting a particular variant and,
therefore, the variant column lists “N/A”.

| SEQ | | | | |
|---|---|---|---|---|
| ID | | | | |
| NO | Chromosome | p.start | p.stop | Variant |
| 1 | chr1 | 881567 | 881687 | 1p36.32_DLBCL |
| 2 | chr1 | 1147362 | 1147482 | 1p36.32_DLBCL |
| 3 | chr1 | 1342552 | 1342672 | 1p36.32_DLBCL |
| 4 | chr1 | 1551867 | 1551987 | 1p36.32_DLBCL |
| 5 | chr1 | 1685980 | 1686100 | 1p36.32_DLBCL |
| 6 | chr1 | 1887185 | 1887305 | 1p36.32_DLBCL |
| 7 | chr1 | 2125112 | 2125232 | 1p36.32_DLBCL |
| 8 | chr1 | 2332331 | 2332451 | 1p36.32_DLBCL |
| 9 | chr1 | 2488078 | 2488198 | TNFRSF14 |
| 10 | chr1 | 2489159 | 2489279 | TNFRSF14 |
| 11 | chr1 | 2489784 | 2489904 | TNFRSF14 |
| 12 | chr1 | 2491261 | 2491417 | TNFRSF14 |
| 13 | chr1 | 2492048 | 2492168 | TNFRSF14 |
| 14 | chr1 | 2493111 | 2493254 | TNFRSF14 |
| 15 | chr1 | 2494259 | 2494379 | TNFRSF14 |
| 16 | chr1 | 2494589 | 2494709 | TNFRSF14 |
| 17 | chr1 | 2535553 | 2535673 | 1p36.32_DLBCL |
| 18 | chr1 | 2723285 | 2723405 | 1p36.32_DLBCL |
| 19 | chr1 | 2938205 | 2938325 | 1p36.32_DLBCL |
| 20 | chr1 | 3301661 | 3301781 | 1p36.32_DLBCL |
| 21 | chr1 | 3428100 | 3428220 | 1p36.32_DLBCL |
| 22 | chr1 | 3607460 | 3607580 | 1p36.32_DLBCL |
| 23 | chr1 | 6257664 | 6257784 | MSI4 |
| 24 | chr1 | 6257792 | 6257912 | MSI81 |
| 25 | chr1 | 12123627 | 12123747 | TNFRSF8 |
| 26 | chr1 | 12144504 | 12144624 | TNFRSF8 |
| 27 | chr1 | 12157156 | 12157276 | TNFRSF8 |
| 28 | chr1 | 12164435 | 12164588 | TNFRSF8 |
| 29 | chr1 | 12169608 | 12169728 | TNFRSF8 |
| 30 | chr1 | 12170097 | 12170261 | TNFRSF8 |
| 31 | chr1 | 12171953 | 12172073 | TNFRSF8 |
| 32 | chr1 | 12175633 | 12175786 | TNFRSF8 |
| 33 | chr1 | 12183327 | 12183447 | TNFRSF8 |
| 34 | chr1 | 12183768 | 12183888 | TNFRSF8 |
| 35 | chr1 | 12185998 | 12186118 | TNFRSF8 |
| 36 | chr1 | 12186206 | 12186326 | TNFRSF8 |
| 37 | chr1 | 12195597 | 12195717 | TNFRSF8 |
| 38 | chr1 | 12198285 | 12198493 | TNFRSF8 |
| 39 | chr1 | 12202343 | 12202463 | TNFRSF8 |
| 40 | chr1 | 12202468 | 12202588 | TNFRSF8 |
| 41 | chr1 | 24078283 | 24078403 | MSI42 |
| 42 | chr1 | 24078411 | 24078531 | MSI119 |
| 43 | chr1 | 27022894 | 27023232 | ARID1A |
| 44 | chr1 | 27023233 | 27023683 | ARID1A |
| 45 | chr1 | 27023684 | 27024031 | ARID1A |
| 46 | chr1 | 27056141 | 27056354 | ARID1A |
| 47 | chr1 | 27057642 | 27058095 | ARID1A |
| 48 | chr1 | 27059165 | 27059285 | ARID1A |
| 49 | chr1 | 27087346 | 27087466 | ARID1A |
| 50 | chr1 | 27087467 | 27087587 | ARID1A |
| 51 | chr1 | 27087859 | 27087979 | ARID1A |
| 52 | chr1 | 27088642 | 27088810 | ARID1A |
| 53 | chr1 | 27089463 | 27089776 | ARID1A |
| 54 | chr1 | 27092711 | 27092857 | ARID1A |
| 55 | chr1 | 27092942 | 27093062 | ARID1A |
| 56 | chr1 | 27094280 | 27094490 | ARID1A |
| 57 | chr1 | 27097609 | 27097817 | ARID1A |
| 58 | chr1 | 27098990 | 27099123 | ARID1A |
| 59 | chr1 | 27099302 | 27099478 | ARID1A |
| 60 | chr1 | 27099836 | 27099987 | ARID1A |
| 61 | chr1 | 27100070 | 27100208 | ARID1A |
| 62 | chr1 | 27100281 | 27100401 | ARID1A |
| 63 | chr1 | 27100819 | 27101259 | ARID1A |
| 64 | chr1 | 27101260 | 27101711 | ARID1A |
| 65 | chr1 | 27102073 | 27102193 | ARID1A |
| 66 | chr1 | 27105513 | 27105857 | ARID1A |
| 67 | chr1 | 27105858 | 27106319 | ARID1A |
| 68 | chr1 | 27106320 | 27106780 | ARID1A |
| 69 | chr1 | 27106781 | 27107247 | ARID1A |
| 70 | chr1 | 27620987 | 27621107 | MSI14 |
| 71 | chr1 | 27621115 | 27621235 | MSI91 |
| 72 | chr1 | 35846839 | 35846959 | MSI35 |
| 73 | chr1 | 35846968 | 35847088 | MSI112 |
| 74 | chr1 | 39749074 | 39749194 | MACF1_TMBREGION_18 |
| 75 | chr1 | 39802852 | 39803005 | MACF1_TMBREGION_19 |
| 76 | chr1 | 39806474 | 39806627 | MACF1_TMBREGION_17 |
| 77 | chr1 | 65306876 | 65306996 | MSI21 |
| 78 | chr1 | 65307004 | 65307124 | MSI98 |
| 79 | chr1 | 93667395 | 93667515 | MSI56 |
| 80 | chr1 | 93667524 | 93667644 | MSI133 |
| 81 | chr1 | 149857809 | 149858190 | HIST2H2BE |
| 82 | chr1 | 150900190 | 150900450 | SETDB1 |
| 83 | chr1 | 150902442 | 150902594 | SETDB1 |
| 84 | chr1 | 150912373 | 150912493 | SETDB1 |
| 85 | chr1 | 150913794 | 150913914 | SETDB1 |
| 86 | chr1 | 150915041 | 150915161 | SETDB1 |
| 87 | chr1 | 150915327 | 150915529 | SETDB1 |
| 88 | chr1 | 150916372 | 150916492 | SETDB1 |
| 89 | chr1 | 150917393 | 150917513 | SETDB1 |
| 90 | chr1 | 150917518 | 150917638 | SETDB1 |
| 91 | chr1 | 150919365 | 150919485 | SETDB1 |
| 92 | chr1 | 150921597 | 150921754 | SETDB1 |
| 93 | chr1 | 150921845 | 150922001 | SETDB1 |
| 94 | chr1 | 150922933 | 150923240 | SETDB1 |
| 95 | chr1 | 150923241 | 150923566 | SETDB1 |
| 96 | chr1 | 150923839 | 150923959 | SETDB1 |
| 97 | chr1 | 150931653 | 150931823 | SETDB1 |
| 98 | chr1 | 150933038 | 150933342 | SETDB1 |
| 99 | chr1 | 150933343 | 150933667 | SETDB1 |
| 100 | chr1 | 150934560 | 150934680 | SETDB1 |
| 101 | chr1 | 150935062 | 150935195 | SETDB1 |
| 102 | chr1 | 150935449 | 150935615 | SETDB1 |
| 103 | chr1 | 150936005 | 150936217 | SETDB1 |
| 104 | chr1 | 150936455 | 150936575 | SETDB1 |
| 105 | chr1 | 150936721 | 150936841 | SETDB1 |
| 106 | chr1 | 155307879 | 155307999 | MSI38 |
| 107 | chr1 | 155308008 | 155308128 | MSI115 |
| 108 | chr1 | 158641128 | 158641248 | SPTA1_TMBREGION_29 |
| 109 | chr1 | 181721267 | 181721387 | CACNA1E_TMBREGION_1 |
| 110 | chr1 | 186039742 | 186039891 | HMCN1_ TMBREGION_11 |
| 111 | chr1 | 186062268 | 186062388 | HMCN1_TMBREGION_12 |
| 112 | chr1 | 216017634 | 216017840 | USH2A_TMBREGION_41 |
| 113 | chr1 | 231131446 | 231131566 | MSI29 |
| 114 | chr1 | 231131575 | 231131695 | MSI106 |
| 115 | chr1 | 234742882 | 234743238 | #N/A |
| 116 | chr1 | 234743239 | 234743598 | #N/A |
| 117 | chr1 | 234744192 | 234744424 | #N/A |
| 118 | chr1 | 234744425 | 234744887 | #N/A |
| 119 | chr1 | 234744888 | 234745240 | #N/A |
| 120 | chr1 | 242013727 | 242013888 | #N/A |
| 121 | chr1 | 242015593 | 242015713 | #N/A |
| 122 | chr1 | 242016661 | 242016781 | #N/A |
| 123 | chr1 | 242020646 | 242020784 | #N/A |
| 124 | chr1 | 242021807 | 242022020 | #N/A |
| 125 | chr1 | 242023818 | 242024006 | #N/A |
| 126 | chr1 | 242024696 | 242024816 | #N/A |
| 127 | chr1 | 242030131 | 242030357 | #N/A |
| 128 | chr1 | 242035333 | 242035453 | #N/A |
| 129 | chr1 | 242035460 | 242035580 | #N/A |
| 130 | chr1 | 242042050 | 242042287 | #N/A |
| 131 | chr1 | 242042288 | 242042645 | #N/A |
| 132 | chr1 | 242045208 | 242045328 | #N/A |
| 133 | chr1 | 242048615 | 242048809 | #N/A |
| 134 | chr1 | 242052766 | 242052902 | #N/A |
| 135 | chr2 | 21238240 | 21238419 | APOB_TMBREGION |
| 136 | chr2 | 47630330 | 47630541 | #N/A |
| 137 | chr2 | 47635539 | 47635694 | #N/A |
| 138 | chr2 | 47637232 | 47637511 | #N/A |
| 139 | chr2 | 47639552 | 47639699 | #N/A |
| 140 | chr2 | 47641407 | 47641557 | #N/A |
| 141 | chr2 | 47643434 | 47643568 | #N/A |
| 142 | chr2 | 47656880 | 47657080 | #N/A |
| 143 | chr2 | 47672681 | 47672801 | #N/A |
| 144 | chr2 | 47690171 | 47690291 | #N/A |
| 145 | chr2 | 47693796 | 47693947 | #N/A |
| 146 | chr2 | 47698092 | 47698212 | #N/A |
| 147 | chr2 | 47702163 | 47702283 | #N/A |
| 148 | chr2 | 47702289 | 47702409 | #N/A |
| 149 | chr2 | 47703505 | 47703710 | #N/A |
| 150 | chr2 | 47705410 | 47705530 | #N/A |
| 151 | chr2 | 47705538 | 47705658 | #N/A |
| 152 | chr2 | 47707834 | 47708010 | #N/A |
| 153 | chr2 | 47709917 | 47710088 | #N/A |
| 154 | chr2 | 48010372 | 48010632 | #N/A |
| 155 | chr2 | 48018065 | 48018262 | #N/A |
| 156 | chr2 | 48023032 | 48023202 | #N/A |
| 157 | chr2 | 48025749 | 48026094 | #N/A |
| 158 | chr2 | 48026095 | 48026556 | #N/A |
| 159 | chr2 | 48026557 | 48027018 | #N/A |
| 160 | chr2 | 48027019 | 48027480 | #N/A |
| 161 | chr2 | 48027481 | 48027942 | #N/A |
| 162 | chr2 | 48027943 | 48028294 | #N/A |
| 163 | chr2 | 48030558 | 48030824 | #N/A |
| 164 | chr2 | 48032047 | 48032167 | #N/A |
| 165 | chr2 | 48032741 | 48032861 | #N/A |
| 166 | chr2 | 48033342 | 48033497 | #N/A |
| 167 | chr2 | 48033590 | 48033790 | #N/A |
| 168 | chr2 | 48033898 | 48034018 | #N/A |
| 169 | chr2 | 58316754 | 58316874 | 2p15_HL_Region |
| 170 | chr2 | 58514606 | 58514726 | 2p15_HL_Region |
| 171 | chr2 | 58712575 | 58712695 | 2p15_HL_Region |
| 172 | chr2 | 58913339 | 58913459 | 2p15_HL_Region |
| 173 | chr2 | 59164942 | 59165062 | 2p15_HL_Region |
| 174 | chr2 | 59372911 | 59373031 | 2p15_HL_Region |
| 175 | chr2 | 59566636 | 59566756 | 2p15_HL_Region |
| 176 | chr2 | 59761458 | 59761578 | 2p15_HL_Region |
| 177 | chr2 | 59961236 | 59961356 | 2p15_HL_Region |
| 178 | chr2 | 60161097 | 60161217 | 2p15_HL_Region |
| 179 | chr2 | 60355618 | 60355738 | 2p15_HL_Region |
| 180 | chr2 | 60537681 | 60537801 | 2p15_HL_Region |
| 181 | chr2 | 60679690 | 60679810 | #N/A |
| 182 | chr2 | 60687538 | 60687776 | #N/A |
| 183 | chr2 | 60687777 | 60688251 | #N/A |
| 184 | chr2 | 60688252 | 60688725 | #N/A |
| 185 | chr2 | 60688726 | 60689200 | #N/A |
| 186 | chr2 | 60689201 | 60689559 | #N/A |
| 187 | chr2 | 60695857 | 60695977 | #N/A |
| 188 | chr2 | 60773105 | 60773435 | #N/A |
| 189 | chr2 | 60780318 | 60780438 | #N/A |
| 190 | chr2 | 61009849 | 61009969 | 2p15_HL_Region |
| 191 | chr2 | 61108920 | 61109040 | #N/A |
| 192 | chr2 | 61118817 | 61118960 | #N/A |
| 193 | chr2 | 61121531 | 61121680 | #N/A |
| 194 | chr2 | 61128112 | 61128232 | #N/A |
| 195 | chr2 | 61144011 | 61144152 | #N/A |
| 196 | chr2 | 61145318 | 61145438 | #N/A |
| 197 | chr2 | 61145528 | 61145741 | #N/A |
| 198 | chr2 | 61147150 | 61147270 | #N/A |
| 199 | chr2 | 61147683 | 61147803 | #N/A |
| 200 | chr2 | 61148897 | 61149223 | #N/A |
| 201 | chr2 | 61149224 | 61149670 | #N/A |
| 202 | chr2 | 61175252 | 61175372 | 2p15_HL_Region |
| 203 | chr2 | 61304211 | 61304331 | 2p15_HL_Region |
| 204 | chr2 | 61450394 | 61450514 | 2p15_HL_Region |
| 205 | chr2 | 61647841 | 61647961 | 2p15_HL_Region |
| 206 | chr2 | 61705954 | 61706101 | #N/A |
| 207 | chr2 | 61708308 | 61708428 | #N/A |
| 208 | chr2 | 61709514 | 61709674 | #N/A |
| 209 | chr2 | 61710091 | 61710226 | #N/A |
| 210 | chr2 | 61711071 | 61711240 | #N/A |
| 211 | chr2 | 61712902 | 61713097 | #N/A |
| 212 | chr2 | 61715293 | 61715413 | #N/A |
| 213 | chr2 | 61715722 | 61715906 | #N/A |
| 214 | chr2 | 61717776 | 61717911 | #N/A |
| 215 | chr2 | 61719169 | 61719333 | #N/A |
| 216 | chr2 | 61719459 | 61719616 | #N/A |
| 217 | chr2 | 61719701 | 61719883 | #N/A |
| 218 | chr2 | 61720049 | 61720188 | #N/A |
| 219 | chr2 | 61721028 | 61721226 | #N/A |
| 220 | chr2 | 61722589 | 61722748 | #N/A |
| 221 | chr2 | 61724018 | 61724138 | #N/A |
| 222 | chr2 | 61725807 | 61725927 | #N/A |
| 223 | chr2 | 61725964 | 61726084 | #N/A |
| 224 | chr2 | 61726847 | 61727029 | #N/A |
| 225 | chr2 | 61729093 | 61729213 | #N/A |
| 226 | chr2 | 61729354 | 61729474 | #N/A |
| 227 | chr2 | 61749722 | 61749842 | #N/A |
| 228 | chr2 | 61753545 | 61753665 | #N/A |
| 229 | chr2 | 61760909 | 61761029 | #N/A |
| 230 | chr2 | 61848075 | 61848195 | 2p15_HL_Region |
| 231 | chr2 | 62065699 | 62065819 | 2p15_HL_Region |
| 232 | chr2 | 62274063 | 62274183 | 2p15_HL_Region |
| 233 | chr2 | 62491515 | 62491635 | 2p15_HL_Region |
| 234 | chr2 | 62733193 | 62733313 | 2p15_HL_Region |
| 235 | chr2 | 62939337 | 62939457 | 2p15_HL_Region |
| 236 | chr2 | 74687289 | 74687409 | MSI60 |
| 237 | chr2 | 74687417 | 74687537 | MSI137 |
| 238 | chr2 | 141116393 | 141116513 | LRP1B_TMBREGION_14 |
| 239 | chr2 | 148683565 | 148683685 | MSI1 |
| 240 | chr2 | 148683693 | 148683813 | MSI78 |
| 241 | chr2 | 165551175 | 165551295 | MSI12 |
| 242 | chr2 | 165551304 | 165551424 | MSI89 |
| 243 | chr2 | 169993893 | 169994013 | LRP2_TMBREGION_16 |
| 244 | chr2 | 170163789 | 170163909 | LRP2_TMBREGION_15 |
| 245 | chr2 | 179418639 | 179418945 | TTN_TMBREGION_38 |
| 246 | chr2 | 179458293 | 179458596 | TTN_TMBREGION_35 |
| 247 | chr2 | 179472126 | 179472414 | TTN_TMBREGION_34 |
| 248 | chr2 | 179475718 | 179476000 | TTN_TMBREGION_39 |
| 249 | chr2 | 179478777 | 179479077 | TTN_TMBREGION_37 |
| 250 | chr2 | 179501123 | 179501528 | TTN_TMBREGION_40 |
| 251 | chr2 | 179642429 | 179642704 | TTN_TMBREGION_36 |
| 252 | chr2 | 203921937 | 203922057 | MSI27 |
| 253 | chr2 | 203922066 | 203922186 | MSI104 |
| 254 | chr2 | 207174307 | 207174427 | MSI66 |
| 255 | chr2 | 207174436 | 207174556 | MSI143 |
| 256 | chr2 | 234638162 | 234638282 | MSI47 |
| 257 | chr2 | 234638290 | 234638410 | MSI124 |
| 258 | chr3 | 30691751 | 30691871 | MSI3 |
| 259 | chr3 | 30691881 | 30692001 | MSI80 |
| 260 | chr3 | 37035036 | 37035156 | #N/A |
| 261 | chr3 | 37038095 | 37038215 | #N/A |
| 262 | chr3 | 37042435 | 37042555 | #N/A |
| 263 | chr3 | 37045868 | 37045988 | #N/A |
| 264 | chr3 | 37048458 | 37048578 | #N/A |
| 265 | chr3 | 37050290 | 37050410 | #N/A |
| 266 | chr3 | 37053272 | 37053392 | #N/A |
| 267 | chr3 | 37053486 | 37053606 | #N/A |
| 268 | chr3 | 37055919 | 37056039 | #N/A |
| 269 | chr3 | 37058983 | 37059103 | #N/A |
| 270 | chr3 | 37061800 | 37061954 | #N/A |
| 271 | chr3 | 37067127 | 37067247 | #N/A |
| 272 | chr3 | 37067252 | 37067372 | #N/A |
| 273 | chr3 | 37067378 | 37067498 | #N/A |
| 274 | chr3 | 37070274 | 37070423 | #N/A |
| 275 | chr3 | 37081671 | 37081791 | #N/A |
| 276 | chr3 | 37083730 | 37083850 | #N/A |
| 277 | chr3 | 37089009 | 37089174 | #N/A |
| 278 | chr3 | 37089994 | 37090114 | #N/A |
| 279 | chr3 | 37090391 | 37090511 | #N/A |
| 280 | chr3 | 37091976 | 37092144 | #N/A |
| 281 | chr3 | 51417483 | 51417603 | MSI7 |
| 282 | chr3 | 51417610 | 51417730 | MSI84 |
| 283 | chr3 | 57335817 | 57335937 | #N/A |
| 284 | chr3 | 57484186 | 57484306 | #N/A |
| 285 | chr3 | 57487033 | 57487153 | #N/A |
| 286 | chr3 | 57488049 | 57488206 | #N/A |
| 287 | chr3 | 57489742 | 57489931 | #N/A |
| 288 | chr3 | 57493369 | 57493565 | #N/A |
| 289 | chr3 | 57494108 | 57494267 | #N/A |
| 290 | chr3 | 57494843 | 57494963 | #N/A |
| 291 | chr3 | 57496516 | 57496706 | #N/A |
| 292 | chr3 | 57509263 | 57509383 | #N/A |
| 293 | chr3 | 57509510 | 57509630 | #N/A |
| 294 | chr3 | 57528427 | 57528597 | #N/A |
| 295 | chr3 | 100039615 | 100039735 | MSI17 |
| 296 | chr3 | 100039744 | 100039864 | MSI94 |
| 297 | chr3 | 114057882 | 114058002 | MSI46 |
| 298 | chr3 | 114058009 | 114058129 | MSI123 |
| 299 | chr3 | 142274619 | 142274739 | MSI53 |
| 300 | chr3 | 142274749 | 142274869 | MSI130 |
| 301 | chr3 | 157081106 | 157081226 | MSI51 |
| 302 | chr3 | 157081235 | 157081355 | MSI128 |
| 303 | chr3 | 176743239 | 176743359 | #N/A |
| 304 | chr3 | 176744151 | 176744271 | #N/A |
| 305 | chr3 | 176750758 | 176750924 | #N/A |
| 306 | chr3 | 176751989 | 176752109 | #N/A |
| 307 | chr3 | 176755863 | 176755983 | #N/A |
| 308 | chr3 | 176756101 | 176756221 | #N/A |
| 309 | chr3 | 176763887 | 176764007 | #N/A |
| 310 | chr3 | 176765076 | 176765196 | #N/A |
| 311 | chr3 | 176765245 | 176765365 | #N/A |
| 312 | chr3 | 176767784 | 176767926 | #N/A |
| 313 | chr3 | 176768265 | 176768398 | #N/A |
| 314 | chr3 | 176769291 | 176769514 | #N/A |
| 315 | chr3 | 176771560 | 176771706 | #N/A |
| 316 | chr3 | 176782676 | 176782796 | #N/A |
| 317 | chr3 | 187440245 | 187440389 | #N/A |
| 318 | chr3 | 187442728 | 187442866 | #N/A |
| 319 | chr3 | 187443292 | 187443412 | #N/A |
| 320 | chr3 | 187444518 | 187444686 | #N/A |
| 321 | chr3 | 187446147 | 187446332 | #N/A |
| 322 | chr3 | 187446837 | 187446957 | #N/A |
| 323 | chr3 | 187446959 | 187447079 | #N/A |
| 324 | chr3 | 187447082 | 187447202 | #N/A |
| 325 | chr3 | 187447203 | 187447323 | #N/A |
| 326 | chr3 | 187447325 | 187447445 | #N/A |
| 327 | chr3 | 187447446 | 187447566 | #N/A |
| 328 | chr3 | 187447568 | 187447688 | #N/A |
| 329 | chr3 | 187447689 | 187447809 | #N/A |
| 330 | chr3 | 187449496 | 187449718 | #N/A |
| 331 | chr3 | 187451320 | 187451481 | #N/A |
| 332 | chr4 | 3015349 | 3015469 | MSI44 |
| 333 | chr4 | 3015478 | 3015598 | MSI121 |
| 334 | chr4 | 15995559 | 15995679 | MSI77 |
| 335 | chr4 | 15995687 | 15995807 | MSI154 |
| 336 | chr4 | 79258826 | 79258973 | FRAS1_TMBREGION_7 |
| 337 | chr4 | 83785444 | 83785564 | MSI5 |
| 338 | chr4 | 83785573 | 83785693 | MSI82 |
| 339 | chr4 | 126408498 | 126408763 | FAT4_TMBREGION_6 |
| 340 | chr4 | 186272574 | 186272694 | MSI59 |
| 341 | chr4 | 186272702 | 186272822 | MSI136 |
| 342 | chr5 | 79950546 | 79950783 | #N/A |
| 343 | chr5 | 79952230 | 79952350 | #N/A |
| 344 | chr5 | 79960961 | 79961182 | #N/A |
| 345 | chr5 | 79965915 | 79966128 | #N/A |
| 346 | chr5 | 79968061 | 79968181 | #N/A |
| 347 | chr5 | 79968558 | 79968678 | #N/A |
| 348 | chr5 | 79970794 | 79971042 | MSI8 |
| 349 | chr5 | 79974745 | 79974912 | #N/A |
| 350 | chr5 | 80021268 | 80021388 | #N/A |
| 351 | chr5 | 80024667 | 80024787 | #N/A |
| 352 | chr5 | 80037265 | 80037385 | #N/A |
| 353 | chr5 | 80040319 | 80040439 | #N/A |
| 354 | chr5 | 80057364 | 80057497 | #N/A |
| 355 | chr5 | 80063751 | 80063939 | #N/A |
| 356 | chr5 | 80064653 | 80064822 | #N/A |
| 357 | chr5 | 80071485 | 80071605 | #N/A |
| 358 | chr5 | 80074537 | 80074657 | #N/A |
| 359 | chr5 | 80083377 | 80083497 | #N/A |
| 360 | chr5 | 80088547 | 80088667 | #N/A |
| 361 | chr5 | 80109402 | 80109560 | #N/A |
| 362 | chr5 | 80149948 | 80150135 | #N/A |
| 363 | chr5 | 80160636 | 80160756 | #N/A |
| 364 | chr5 | 80168934 | 80169106 | #N/A |
| 365 | chr5 | 80171565 | 80171685 | #N/A |
| 366 | chr5 | 90050798 | 90051004 | GPR98_TMBREGION_10 |
| 367 | chr5 | 90261230 | 90261350 | GPR98_TMBREGION_9 |
| 368 | chr5 | 131931331 | 131931451 | MSI39 |
| 369 | chr5 | 131931460 | 131931580 | MSI116 |
| 370 | chr5 | 137451241 | 137451361 | MSI22 |
| 371 | chr5 | 137451371 | 137451491 | MSI99 |
| 372 | chr5 | 140048981 | 140049101 | MSI72 |
| 373 | chr5 | 140049109 | 140049229 | MSI149 |
| 374 | chr6 | 26156618 | 26156941 | #N/A |
| 375 | chr6 | 26156942 | 26157278 | #N/A |
| 376 | chr6 | 26199078 | 26199471 | #N/A |
| 377 | chr6 | 29691243 | 29691363 | 6p21_HLA |
| 378 | chr6 | 29797636 | 29797756 | 6p21_HLA |
| 379 | chr6 | 29910307 | 29910427 | #N/A |
| 380 | chr6 | 29910533 | 29910803 | #N/A |
| 381 | chr6 | 29911044 | 29911320 | #N/A |
| 382 | chr6 | 29911898 | 29912174 | #N/A |
| 383 | chr6 | 29912275 | 29912395 | #N/A |
| 384 | chr6 | 29912792 | 29912912 | #N/A |
| 385 | chr6 | 29912974 | 29913094 | #N/A |
| 386 | chr6 | 29913170 | 29913290 | #N/A |
| 387 | chr6 | 30075804 | 30075924 | 6p21_HLA |
| 388 | chr6 | 30297469 | 30297589 | 6p21_HLA |
| 389 | chr6 | 30521077 | 30521197 | 6p21_HLA |
| 390 | chr6 | 30698481 | 30698601 | 6p21_HLA |
| 391 | chr6 | 30893668 | 30893788 | 6p21_HLA |
| 392 | chr6 | 31097393 | 31097513 | 6p21_HLA |
| 393 | chr6 | 31236888 | 31237008 | #N/A |
| 394 | chr6 | 31237078 | 31237198 | #N/A |
| 395 | chr6 | 31237226 | 31237346 | #N/A |
| 396 | chr6 | 31237742 | 31237862 | #N/A |
| 397 | chr6 | 31237986 | 31238262 | #N/A |
| 398 | chr6 | 31238849 | 31239125 | #N/A |
| 399 | chr6 | 31239375 | 31239645 | #N/A |
| 400 | chr6 | 31239752 | 31239872 | #N/A |
| 401 | chr6 | 31322221 | 31322341 | #N/A |
| 402 | chr6 | 31322362 | 31322482 | #N/A |
| 403 | chr6 | 31322882 | 31323002 | #N/A |
| 404 | chr6 | 31323093 | 31323369 | #N/A |
| 405 | chr6 | 31323943 | 31324219 | #N/A |
| 406 | chr6 | 31324464 | 31324734 | #N/A |
| 407 | chr6 | 31324839 | 31324959 | #N/A |
| 408 | chr6 | 31540496 | 31540616 | 6p21_HLA |
| 409 | chr6 | 31748760 | 31748880 | 6p21_HLA |
| 410 | chr6 | 31928954 | 31929074 | 6p21_HLA |
| 411 | chr6 | 32088794 | 32088914 | 6p21_HLA |
| 412 | chr6 | 32291299 | 32291419 | 6p21_HLA |
| 413 | chr6 | 32407708 | 32407828 | #N/A |
| 414 | chr6 | 32410224 | 32410344 | #N/A |
| 415 | chr6 | 32410350 | 32410470 | #N/A |
| 416 | chr6 | 32410961 | 32411243 | #N/A |
| 417 | chr6 | 32411532 | 32411687 | #N/A |
| 418 | chr6 | 32709144 | 32709264 | 6p21_HLA |
| 419 | chr6 | 32916583 | 32916703 | #N/A |
| 420 | chr6 | 32917052 | 32917172 | #N/A |
| 421 | chr6 | 32917387 | 32917666 | #N/A |
| 422 | chr6 | 32918295 | 32918580 | #N/A |
| 423 | chr6 | 32920709 | 32920829 | #N/A |
| 424 | chr6 | 32942242 | 32942362 | 6p21_HLA |
| 425 | chr6 | 33141860 | 33141980 | 6p21_HLA |
| 426 | chr6 | 44226928 | 44227048 | #N/A |
| 427 | chr6 | 44227779 | 44228019 | #N/A |
| 428 | chr6 | 44228172 | 44228292 | #N/A |
| 429 | chr6 | 44229362 | 44229585 | #N/A |
| 430 | chr6 | 44230288 | 44230408 | #N/A |
| 431 | chr6 | 44232718 | 44233047 | #N/A |
| 432 | chr6 | 44233048 | 44233500 | #N/A |
| 433 | chr6 | 74227535 | 74227655 | #N/A |
| 434 | chr6 | 74227752 | 74227987 | #N/A |
| 435 | chr6 | 74228076 | 74228333 | #N/A |
| 436 | chr6 | 74228420 | 74228571 | #N/A |
| 437 | chr6 | 74228654 | 74228951 | #N/A |
| 438 | chr6 | 74229059 | 74229239 | #N/A |
| 439 | chr6 | 74229605 | 74229749 | #N/A |
| 440 | chr6 | 84896112 | 84896232 | MSI73 |
| 441 | chr6 | 84896240 | 84896360 | MSI150 |
| 442 | chr6 | 90432554 | 90432674 | MSI75 |
| 443 | chr6 | 90432682 | 90432802 | MSI152 |
| 444 | chr6 | 100382237 | 100382357 | MSI24 |
| 445 | chr6 | 100382366 | 100382486 | MSI101 |
| 446 | chr6 | 133337408 | 133337528 | 6q23.3_HL_wide |
| 447 | chr6 | 133539938 | 133540058 | 6q23.3_HL_wide |
| 448 | chr6 | 133789668 | 133789788 | 6q23.3_HL_wide |
| 449 | chr6 | 133988956 | 133989076 | 6q23.3_HL_wide |
| 450 | chr6 | 134152531 | 134152651 | 6q23.3_HL_wide |
| 451 | chr6 | 134303963 | 134304083 | 6q23.3_HL_wide |
| 452 | chr6 | 134493337 | 134493457 | 6q23.3_HL_wide |
| 453 | chr6 | 134690685 | 134690805 | 6q23.3_HL_wide |
| 454 | chr6 | 134896154 | 134896274 | 6q23.3_HL_wide |
| 455 | chr6 | 135101128 | 135101248 | 6q23.3_HL_wide |
| 456 | chr6 | 135287473 | 135287593 | 6q23.3_HL_wide |
| 457 | chr6 | 135524456 | 135524576 | 6q23.3_HL_wide |
| 458 | chr6 | 135726553 | 135726673 | 6q23.3_HL_wide |
| 459 | chr6 | 135926490 | 135926610 | 6q23.3_HL_wide |
| 460 | chr6 | 136204445 | 136204565 | 6q23.3_HL_wide |
| 461 | chr6 | 136396814 | 136396934 | 6q23.3_HL_wide |
| 462 | chr6 | 136682112 | 136682232 | 6q23.3_HL_wide |
| 463 | chr6 | 136977508 | 136977628 | 6q23.3_HL_wide |
| 464 | chr6 | 137113077 | 137113197 | 6q23.3_HL_wide |
| 465 | chr6 | 137323153 | 137323273 | 6q23.3_HL_wide |
| 466 | chr6 | 137540310 | 137540430 | 6q23.3_HL_wide |
| 467 | chr6 | 137747289 | 137747409 | 6q23.3_HL_wide |
| 468 | chr6 | 137900447 | 137900567 | 6q23.3_HL_wide |
| 469 | chr6 | 138192364 | 138192659 | #N/A |
| 470 | chr6 | 138195981 | 138196172 | #N/A |
| 471 | chr6 | 138196824 | 138196972 | #N/A |
| 472 | chr6 | 138197132 | 138197303 | #N/A |
| 473 | chr6 | 138198212 | 138198393 | #N/A |
| 474 | chr6 | 138199568 | 138200024 | #N/A |
| 475 | chr6 | 138200025 | 138200488 | #N/A |
| 476 | chr6 | 138201207 | 138201389 | #N/A |
| 477 | chr6 | 138202171 | 138202456 | #N/A |
| 478 | chr6 | 138413209 | 138413329 | 6q23.3_HL_wide |
| 479 | chr6 | 138584625 | 138584745 | 6q23.3_HL_wide |
| 480 | chr6 | 138754263 | 138754383 | 6q23.3_HL_wide |
| 481 | chr6 | 138950180 | 138950300 | 6q23.3_HL_wide |
| 482 | chr6 | 139097209 | 139097329 | MSI61 |
| 483 | chr6 | 139097337 | 139097457 | MSI138 |
| 484 | chr6 | 139197549 | 139197669 | 6q23.3_HL_wide |
| 485 | chr6 | 139487776 | 139487896 | 6q23.3_HL_wide |
| 486 | chr6 | 139686262 | 139686382 | 6q23.3_HL_wide |
| 487 | chr6 | 139972128 | 139972248 | 6q23.3_HL_wide |
| 488 | chr6 | 140167254 | 140167374 | 6q23.3_HL_wide |
| 489 | chr6 | 140480821 | 140480941 | 6q23.3_HL_wide |
| 490 | chr6 | 140676701 | 140676821 | 6q23.3_HL_wide |
| 49 | chr6 | 140884483 | 140884603 | 6q23.3_HL_wide |
| 492 | chr6 | 141087151 | 141087271 | 6q23.3_HL_wide |
| 493 | chr6 | 141283632 | 141283752 | 6q23.3_HL_wide |
| 494 | chr6 | 141479910 | 141480030 | 6q23.3_HL_wide |
| 495 | chr6 | 141703089 | 141703209 | 6q23.3_HL_wide |
| 496 | chr6 | 141905706 | 141905826 | 6q23.3_HL_wide |
| 497 | chr6 | 142123486 | 142123606 | 6q23.3_HL_wide |
| 498 | chr6 | 142316117 | 142316237 | 6q23.3_HL_wide |
| 499 | chr6 | 142487409 | 142487529 | 6q23.3_HL_wide |
| 500 | chr6 | 142623407 | 142623527 | #N/A |
| 501 | chr6 | 142630671 | 142630791 | #N/A |
| 502 | chr6 | 142688705 | 142689047 | #N/A |
| 503 | chr6 | 142691306 | 142691607 | #N/A |
| 504 | chr6 | 142691608 | 142691930 | #N/A |
| 505 | chr6 | 142703062 | 142703182 | #N/A |
| 506 | chr6 | 142704878 | 142704998 | #N/A |
| 507 | chr6 | 142711377 | 142711497 | #N/A |
| 508 | chr6 | 142714051 | 142714171 | #N/A |
| 509 | chr6 | 142715004 | 142715124 | #N/A |
| 510 | chr6 | 142718749 | 142718892 | #N/A |
| 511 | chr6 | 142721617 | 142721737 | #N/A |
| 512 | chr6 | 142723103 | 142723223 | #N/A |
| 513 | chr6 | 142723756 | 142723967 | #N/A |
| 514 | chr6 | 142724938 | 142725110 | #N/A |
| 515 | chr6 | 142726824 | 142726965 | #N/A |
| 516 | chr6 | 142729286 | 142729406 | #N/A |
| 517 | chr6 | 142730973 | 142731093 | #N/A |
| 518 | chr6 | 142732435 | 142732555 | #N/A |
| 519 | chr6 | 142736109 | 142736229 | #N/A |
| 520 | chr6 | 142736932 | 142737201 | #N/A |
| 521 | chr6 | 142738398 | 142738518 | #N/A |
| 522 | chr6 | 142740957 | 142741241 | #N/A |
| 523 | chr6 | 142758561 | 142758681 | #N/A |
| 524 | chr6 | 142759348 | 142759501 | #N/A |
| 525 | chr6 | 142762007 | 142762127 | #N/A |
| 526 | chr6 | 142764473 | 142764652 | #N/A |
| 527 | chr6 | 143074640 | 143074760 | 6q23.3_HL_wide |
| 528 | chr6 | 143382050 | 143382170 | 6q23.3_HL_wide |
| 529 | chr6 | 143580051 | 143580171 | 6q23.3_HL_wide |
| 530 | chr6 | 143792615 | 143792735 | 6q23.3_HL_wide |
| 531 | chr6 | 144020331 | 144020451 | 6q23.3_HL_wide |
| 532 | chr6 | 144227071 | 144227191 | 6q23.3_HL_wide |
| 533 | chr6 | 144426051 | 144426171 | 6q23.3_HL_wide |
| 534 | chr6 | 144607586 | 144607706 | 6q23.3_HL_wide |
| 535 | chr6 | 144758739 | 144758859 | 6q23.3_HL_wide |
| 536 | chr6 | 144869725 | 144869845 | 6q23.3_HL_wide |
| 537 | chr6 | 145051534 | 145051654 | 6q23.3_HL_wide |
| 538 | chr6 | 145167918 | 145168038 | 6q23.3_HL_wide |
| 539 | chr6 | 145367695 | 145367815 | 6q23.3_HL_wide |
| 540 | chr6 | 145572105 | 145572225 | 6q23.3_HL_wide |
| 541 | chr6 | 145767752 | 145767872 | 6q23.3_HL_wide |
| 542 | chr6 | 146007272 | 146007392 | 6q23.3_HL_wide |
| 543 | chr6 | 146207503 | 146207623 | 6q23.3_HL_wide |
| 544 | chr6 | 146398347 | 146398467 | 6q23.3_HL_wide |
| 545 | chr6 | 146578691 | 146578811 | 6q23.3_HL_wide |
| 546 | chr6 | 146755080 | 146755200 | 6q23.3_HL_wide |
| 547 | chr6 | 146993385 | 146993505 | 6q23.3_HL_wide |
| 548 | chr6 | 147189907 | 147190027 | 6q23.3_HL_wide |
| 549 | chr6 | 147391266 | 147391386 | 6q23.3_HL_wide |
| 550 | chr6 | 147680299 | 147680419 | 6q23.3_HL_wide |
| 551 | chr6 | 147830013 | 147830133 | 6q23.3_HL_wide |
| 552 | chr6 | 152462341 | 152462461 | SYNE1_TMBREGION_33 |
| 553 | chr6 | 152497527 | 152497697 | SYNE1_TMBREGION_30 |
| 554 | chr6 | 152621774 | 152621918 | SYNE1_TMBREGION_32 |
| 555 | chr6 | 152725339 | 152725459 | SYNE1_TMBREGION_31 |
| 556 | chr6 | 158507888 | 158508008 | MSI71 |
| 557 | chr6 | 158508016 | 158508136 | MSI148 |
| 558 | chr6 | 163899799 | 163899919 | MSI57 |
| 559 | chr6 | 163899927 | 163900047 | MSI134 |
| 560 | chr7 | 2946271 | 2946476 | #N/A |
| 561 | chr7 | 2949681 | 2949801 | #N/A |
| 562 | chr7 | 2951808 | 2951928 | #N/A |
| 563 | chr7 | 2952920 | 2953100 | #N/A |
| 564 | chr7 | 2954870 | 2955006 | #N/A |
| 565 | chr7 | 2956911 | 2957031 | #N/A |
| 566 | chr7 | 2958113 | 2958233 | #N/A |
| 567 | chr7 | 2959005 | 2959125 | #N/A |
| 568 | chr7 | 2959126 | 2959246 | #N/A |
| 569 | chr7 | 2962271 | 2962391 | #N/A |
| 570 | chr7 | 2962765 | 2962967 | #N/A |
| 571 | chr7 | 2963866 | 2963999 | #N/A |
| 572 | chr7 | 2966339 | 2966459 | #N/A |
| 573 | chr7 | 2968222 | 2968342 | #N/A |
| 574 | chr7 | 2969607 | 2969727 | #N/A |
| 575 | chr7 | 2972134 | 2972254 | #N/A |
| 576 | chr7 | 2974086 | 2974263 | #N/A |
| 577 | chr7 | 2976670 | 2976868 | #N/A |
| 578 | chr7 | 2977543 | 2977663 | #N/A |
| 579 | chr7 | 2978312 | 2978465 | #N/A |
| 580 | chr7 | 2979382 | 2979562 | #N/A |
| 581 | chr7 | 2983845 | 2984171 | #N/A |
| 582 | chr7 | 2985452 | 2985590 | #N/A |
| 583 | chr7 | 2987208 | 2987421 | #N/A |
| 584 | chr7 | 2998077 | 2998197 | #N/A |
| 585 | chr7 | 5567378 | 5567522 | #N/A |
| 586 | chr7 | 5567634 | 5567816 | #N/A |
| 587 | chr7 | 5567911 | 5568350 | #N/A |
| 588 | chr7 | 5568791 | 5569031 | #N/A |
| 589 | chr7 | 5569167 | 5569287 | #N/A |
| 590 | chr7 | 6013029 | 6013173 | #N/A |
| 591 | chr7 | 6017218 | 6017388 | #N/A |
| 592 | chr7 | 6018217 | 6018337 | #N/A |
| 593 | chr7 | 6022454 | 6022622 | #N/A |
| 594 | chr7 | 6026389 | 6026812 | #N/A |
| 595 | chr7 | 6026813 | 6027251 | #N/A |
| 596 | chr7 | 6029430 | 6029586 | #N/A |
| 597 | chr7 | 6031586 | 6031706 | #N/A |
| 598 | chr7 | 6035154 | 6035274 | #N/A |
| 599 | chr7 | 6036945 | 6037065 | #N/A |
| 600 | chr7 | 6038738 | 6038906 | #N/A |
| 601 | chr7 | 6042083 | 6042267 | #N/A |
| 602 | chr7 | 6043312 | 6043432 | #N/A |
| 603 | chr7 | 6043586 | 6043706 | #N/A |
| 604 | chr7 | 6045522 | 6045662 | #N/A |
| 605 | chr7 | 6048579 | 6048699 | #N/A |
| 606 | chr7 | 8198130 | 8198250 | MSI67 |
| 607 | chr7 | 8198259 | 8198379 | MSI144 |
| 608 | chr7 | 21775256 | 21775464 | DNAH11_TMBREGION_3 |
| 609 | chr7 | 77423339 | 77423459 | MSI10 |
| 610 | chr7 | 77423468 | 77423588 | MSI87 |
| 611 | chr7 | 82389953 | 82390102 | PCLO_TMBREGION_25 |
| 612 | chr7 | 100802284 | 100802404 | MSI76 |
| 613 | chr7 | 100802412 | 100802532 | MSI153 |
| 614 | chr7 | 101459282 | 101459402 | #N/A |
| 615 | chr7 | 101460874 | 101460994 | #N/A |
| 616 | chr7 | 101559390 | 101559510 | #N/A |
| 617 | chr7 | 101671341 | 101671461 | #N/A |
| 618 | chr7 | 101713598 | 101713718 | #N/A |
| 619 | chr7 | 101740643 | 101740781 | #N/A |
| 620 | chr7 | 101747617 | 101747737 | #N/A |
| 621 | chr7 | 101754956 | 101755076 | #N/A |
| 622 | chr7 | 101758460 | 101758580 | #N/A |
| 623 | chr7 | 101801804 | 101801924 | #N/A |
| 624 | chr7 | 101813718 | 101813838 | #N/A |
| 625 | chr7 | 101821748 | 101821937 | #N/A |
| 626 | chr7 | 101833062 | 101833182 | #N/A |
| 627 | chr7 | 101837086 | 101837206 | #N/A |
| 628 | chr7 | 101838775 | 101838895 | #N/A |
| 629 | chr7 | 101839913 | 101840243 | #N/A |
| 630 | chr7 | 101840244 | 101840585 | #N/A |
| 631 | chr7 | 101842054 | 101842174 | #N/A |
| 632 | chr7 | 101843341 | 101843461 | #N/A |
| 633 | chr7 | 101844639 | 101844759 | #N/A |
| 634 | chr7 | 101844760 | 101844880 | #N/A |
| 635 | chr7 | 101844882 | 101845122 | #N/A |
| 636 | chr7 | 101845123 | 101845363 | #N/A |
| 637 | chr7 | 101845364 | 101845484 | #N/A |
| 638 | chr7 | 101847670 | 101847836 | #N/A |
| 639 | chr7 | 101848362 | 101848482 | #N/A |
| 640 | chr7 | 101870646 | 101870949 | #N/A |
| 641 | chr7 | 101877331 | 101877520 | #N/A |
| 642 | chr7 | 101882599 | 101882864 | #N/A |
| 643 | chr7 | 101891691 | 101891996 | #N/A |
| 644 | chr7 | 101891997 | 101892322 | #N/A |
| 645 | chr7 | 101916640 | 101916760 | #N/A |
| 646 | chr7 | 101917488 | 101917608 | #N/A |
| 647 | chr7 | 101918514 | 101918634 | #N/A |
| 648 | chr7 | 101921218 | 101921338 | #N/A |
| 649 | chr7 | 101923310 | 101923430 | #N/A |
| 650 | chr7 | 101924064 | 101924184 | #N/A |
| 651 | chr7 | 101925112 | 101925232 | #N/A |
| 652 | chr7 | 101925976 | 101926096 | #N/A |
| 653 | chr7 | 101926287 | 101926407 | #N/A |
| 654 | chr7 | 148504708 | 148504828 | #N/A |
| 655 | chr7 | 148506145 | 148506265 | #N/A |
| 656 | chr7 | 148506382 | 148506502 | #N/A |
| 657 | chr7 | 148507405 | 148507525 | #N/A |
| 658 | chr7 | 148508704 | 148508824 | #N/A |
| 659 | chr7 | 148511050 | 148511229 | #N/A |
| 660 | chr7 | 148512008 | 148512128 | #N/A |
| 661 | chr7 | 148512558 | 148512678 | #N/A |
| 662 | chr7 | 148513763 | 148513883 | #N/A |
| 663 | chr7 | 148514313 | 148514483 | #N/A |
| 664 | chr7 | 148514968 | 148515088 | #N/A |
| 665 | chr7 | 148515089 | 148515209 | #N/A |
| 666 | chr7 | 148516673 | 148516793 | #N/A |
| 667 | chr7 | 148523545 | 148523724 | #N/A |
| 668 | chr7 | 148524247 | 148524367 | #N/A |
| 669 | chr7 | 148525831 | 148525972 | #N/A |
| 670 | chr7 | 148526820 | 148526940 | #N/A |
| 671 | chr7 | 148529724 | 148529844 | #N/A |
| 672 | chr7 | 148543566 | 148543686 | #N/A |
| 673 | chr7 | 148544272 | 148544392 | #N/A |
| 674 | chr8 | 37791713 | 37791833 | MSI48 |
| 675 | chr8 | 37791842 | 37791962 | MSI125 |
| 676 | chr8 | 42128878 | 42128998 | #N/A |
| 677 | chr8 | 42129611 | 42129731 | #N/A |
| 678 | chr8 | 42146139 | 42146259 | #N/A |
| 679 | chr8 | 42147672 | 42147792 | #N/A |
| 680 | chr8 | 42150935 | 42151055 | #N/A |
| 681 | chr8 | 42162689 | 42162809 | #N/A |
| 682 | chr8 | 42163845 | 42163965 | #N/A |
| 683 | chr8 | 42166421 | 42166541 | #N/A |
| 684 | chr8 | 42171833 | 42171953 | #N/A |
| 685 | chr8 | 42173732 | 42173852 | #N/A |
| 686 | chr8 | 42174227 | 42174422 | #N/A |
| 687 | chr8 | 42175172 | 42175292 | #N/A |
| 688 | chr8 | 42176071 | 42176191 | #N/A |
| 689 | chr8 | 42176787 | 42176939 | #N/A |
| 690 | chr8 | 42177073 | 42177193 | #N/A |
| 691 | chr8 | 42178247 | 42178367 | #N/A |
| 692 | chr8 | 42179378 | 42179498 | #N/A |
| 693 | chr8 | 42179561 | 42179681 | #N/A |
| 694 | chr8 | 42179864 | 42180012 | #N/A |
| 695 | chr8 | 42183491 | 42183611 | #N/A |
| 696 | chr8 | 42186627 | 42186747 | #N/A |
| 697 | chr8 | 42188404 | 42188524 | #N/A |
| 698 | chr8 | 95686490 | 95686610 | MSI11 |
| 699 | chr8 | 95686618 | 95686738 | MSI88 |
| 700 | chr8 | 103289228 | 103289348 | MSI26 |
| 701 | chr8 | 103289356 | 103289476 | MSI103 |
| 702 | chr9 | 4118051 | 4118171 | 9p24.1_DLBCL |
| 703 | chr9 | 4317206 | 4317326 | 9p24.1_DLBCL |
| 704 | chr9 | 4454279 | 4454399 | #N/A |
| 705 | chr9 | 4564372 | 4564492 | 9p24.1_DLBCL |
| 706 | chr9 | 4576620 | 4576740 | 9p24.1_DLBCL |
| 707 | chr9 | 4684948 | 4685068 | 9p24.1_DLBCL |
| 708 | chr9 | 4857959 | 4858079 | #N/A |
| 709 | chr9 | 5021987 | 5022213 | JAK2 |
| 710 | chr9 | 5029784 | 5029904 | JAK2 |
| 711 | chr9 | 5044401 | 5044521 | JAK2 |
| 712 | chr9 | 5050685 | 5050831 | JAK2 |
| 713 | chr9 | 5054562 | 5054884 | JAK2 |
| 714 | chr9 | 5055668 | 5055788 | JAK2 |
| 715 | chr9 | 5064882 | 5065040 | JAK2 |
| 716 | chr9 | 5066673 | 5066793 | JAK2 |
| 717 | chr9 | 5069021 | 5069208 | JAK2 |
| 718 | chr9 | 5069928 | 5070048 | JAK2 |
| 719 | chr9 | 5072491 | 5072626 | JAK2 |
| 720 | chr9 | 5073681 | 5073801 | JAK2 |
| 721 | chr9 | 5077456 | 5077576 | JAK2 |
| 722 | chr9 | 5078305 | 5078444 | JAK2 |
| 723 | chr9 | 5080228 | 5080380 | JAK2 |
| 724 | chr9 | 5080532 | 5080683 | JAK2 |
| 725 | chr9 | 5081724 | 5081861 | JAK2 |
| 726 | chr9 | 5089673 | 5089863 | JAK2 |
| 727 | chr9 | 5090448 | 5090568 | JAK2 |
| 728 | chr9 | 5090738 | 5090911 | JAK2 |
| 729 | chr9 | 5123002 | 5123122 | JAK2 |
| 730 | chr9 | 5126329 | 5126449 | JAK2 |
| 731 | chr9 | 5126677 | 5126797 | JAK2 |
| 732 | chr9 | 5231652 | 5231772 | 9p24.1_DLBCL |
| 733 | chr9 | 5335410 | 5335530 | 9p24.1_DLBCL |
| 734 | chr9 | 5450597 | 5451071 | CD274_SV |
| 735 | chr9 | 5451072 | 5451546 | CD274_SV |
| 736 | chr9 | 5451547 | 5452022 | CD274_SV |
| 737 | chr9 | 5452259 | 5452495 | CD274_SV |
| 738 | chr9 | 5452496 | 5452969 | CD274_SV |
| 739 | chr9 | 5452970 | 5453445 | CD274_SV |
| 740 | chr9 | 5453446 | 5453919 | CD274_SV |
| 741 | chr9 | 5453920 | 5454395 | CD274_SV |
| 742 | chr9 | 5454396 | 5454869 | CD274_SV |
| 743 | chr9 | 5454870 | 5455344 | CD274_SV |
| 744 | chr9 | 5455345 | 5455819 | CD274_SV |
| 745 | chr9 | 5455820 | 5456199 | CD274_SV |
| 746 | chr9 | 5457078 | 5457420 | CD274_SV |
| 747 | chr9 | 5462833 | 5463121 | CD274_SV |
| 748 | chr9 | 5465492 | 5465612 | CD274_SV |
| 749 | chr9 | 5466739 | 5466859 | CD274_SV |
| 750 | chr9 | 5467791 | 5468350 | CD274_SV |
| 751 | chr9 | 5468351 | 5468824 | CD274_SV |
| 752 | chr9 | 5468825 | 5469301 | CD274_SV |
| 753 | chr9 | 5469302 | 5469777 | CD274_SV |
| 754 | chr9 | 5469778 | 5470253 | CD274_SV |
| 755 | chr9 | 5470254 | 5470728 | CD274_SV |
| 756 | chr9 | 5470729 | 5471205 | CD274-PDCD1LG2 |
| | | | | intergenic region_SV |
| 757 | chr9 | 5471445 | 5471804 | CD274-PDCD1LG2 |
| | | | | intergenic region_SV |
| 758 | chr9 | 5477920 | 5478160 | CD274-PDCD1LG2 |
| | | | | intergenic region_SV |
| 759 | chr9 | 5478279 | 5478399 | CD274-PDCD1LG2 |
| | | | | intergenic region_SV |
| 760 | chr9 | 5478519 | 5478879 | CD274-PDCD1LG2 |
| | | | | intergenic region_SV |
| 761 | chr9 | 5478999 | 5479238 | CD274-PDCD1LG2 |
| | | | | intergenic region_SV |
| 762 | chr9 | 5479239 | 5479716 | CD274-PDCD1LG2 |
| | | | | intergenic region_SV |
| 763 | chr9 | 5479717 | 5480196 | CD274-PDCD1LG2 |
| | | | | intergenic region_SV |
| 764 | chr9 | 5480197 | 5480436 | CD274-PDCD1LG2 |
| | | | | intergenic region_SV |
| 765 | chr9 | 5480437 | 5480677 | CD274-PDCD1LG2 |
| | | | | intergenic region_SV |
| 766 | chr9 | 5480678 | 5480917 | CD274-PDCD1LG2 |
| | | | | intergenic region_SV |
| 767 | chr9 | 5480918 | 5481157 | CD274-PDCD1LG2 |
| | | | | intergenic region_SV |
| 768 | chr9 | 5481158 | 5481636 | CD274-PDCD1LG2 |
| | | | | intergenic region_SV |
| 769 | chr9 | 5481637 | 5482116 | CD274-PDCD1LG2 |
| | | | | intergenic region_SV |
| 770 | chr9 | 5482117 | 5482476 | CD274-PDCD1LG2 |
| | | | | intergenic region_SV |
| 771 | chr9 | 5482716 | 5482955 | CD274-PDCD1LG2 |
| | | | | intergenic region_SV |
| 772 | chr9 | 5483075 | 5483314 | CD274-PDCD1LG2 |
| | | | | intergenic region_SV |
| 773 | chr9 | 5483315 | 5483555 | CD274-PDCD1LG2 |
| | | | | intergenic region_SV |
| 774 | chr9 | 5483556 | 5483795 | CD274-PDCD1LG2 |
| | | | | intergenic region_SV |
| 775 | chr9 | 5483796 | 5484036 | CD274-PDCD1LG2 |
| | | | | intergenic region_SV |
| 776 | chr9 | 5484037 | 5484275 | CD274-PDCD1LG2 |
| | | | | intergenic region_SV |
| 777 | chr9 | 5484276 | 5484515 | CD274-PDCD1LG2 |
| | | | | intergenic region_SV |
| 778 | chr9 | 5484516 | 5484636 | CD274-PDCD1LG2 |
| | | | | intergenic region_SV |
| 779 | chr9 | 5484755 | 5485114 | CD274-PDCD1LG2 |
| | | | | intergenic region_SV |
| 780 | chr9 | 5485115 | 5485235 | CD274-PDCD1LG2 |
| | | | | intergenic region_SV |
| 781 | chr9 | 5485236 | 5485594 | CD274-PDCD1LG2 |
| | | | | intergenic region_SV |
| 782 | chr9 | 5485595 | 5486073 | CD274-PDCD1LG2 |
| | | | | intergenic region_SV |
| 783 | chr9 | 5486074 | 5486194 | CD274-PDCD1LG2 |
| | | | | intergenic region_SV |
| 784 | chr9 | 5486195 | 5486552 | CD274-PDCD1LG2 |
| | | | | intergenic region_SV |
| 785 | chr9 | 5486553 | 5486673 | CD274-PDCD1LG2 |
| | | | | intergenic region_SV |
| 786 | chr9 | 5486674 | 5487032 | CD274-PDCD1LG2 |
| | | | | intergenic region_SV |
| 787 | chr9 | 5487033 | 5487392 | CD274-PDCD1LG2 |
| | | | | intergenic region_SV |
| 788 | chr9 | 5487630 | 5488108 | CD274-PDCD1LG2 |
| | | | | intergenic region_SV |
| 789 | chr9 | 5488109 | 5488586 | CD274-PDCD1LG2 |
| | | | | intergenic region_SV |
| 790 | chr9 | 5488587 | 5488827 | CD274-PDCD1LG2 |
| | | | | intergenic region_SV |
| 791 | chr9 | 5488828 | 5489067 | CD274-PDCD1LG2 |
| | | | | intergenic region_SV |
| 792 | chr9 | 5489068 | 5489308 | CD274-PDCD1LG2 |
| | | | | intergenic region_SV |
| 793 | chr9 | 5489309 | 5489547 | CD274-PDCD1LG2 |
| | | | | intergenic region_SV |
| 794 | chr9 | 5489548 | 5489788 | CD274-PDCD1LG2 |
| | | | | intergenic region_SV |
| 795 | chr9 | 5489789 | 5490027 | CD274-PDCD1LG2 |
| | | | | intergenic region_SV |
| 796 | chr9 | 5490028 | 5490267 | CD274-PDCD1LG2 |
| | | | | intergenic region_SV |
| 797 | chr9 | 5490268 | 5490506 | CD274-PDCD1LG2 |
| | | | | intergenic region_SV |
| 798 | chr9 | 5490507 | 5490986 | CD274-PDCD1LG2 |
| | | | | intergenic region_SV |
| 799 | chr9 | 5491226 | 5491704 | CD274-PDCD1LG2 |
| | | | | intergenic region_SV |
| 800 | chr9 | 5491705 | 5491944 | CD274-PDCD1LG2 |
| | | | | intergenic region_SV |
| 801 | chr9 | 5491945 | 5492183 | CD274-PDCD1LG2 |
| | | | | intergenic region_SV |
| 802 | chr9 | 5492184 | 5492423 | CD274-PDCD1LG2 |
| | | | | intergenic region_SV |
| 803 | chr9 | 5492424 | 5492663 | CD274-PDCD1LG2 |
| | | | | intergenic region_SV |
| 804 | chr9 | 5492901 | 5493259 | CD274-PDCD1LG2 |
| | | | | intergenic region_SV |
| 805 | chr9 | 5493260 | 5493738 | CD274-PDCD1LG2 |
| | | | | intergenic region_SV |
| 806 | chr9 | 5493739 | 5494218 | CD274-PDCD1LG2 |
| | | | | intergenic region_SV |
| 807 | chr9 | 5494219 | 5494339 | CD274-PDCD1LG2 |
| | | | | intergenic region_SV |
| 808 | chr9 | 5494340 | 5494579 | CD274-PDCD1LG2 |
| | | | | intergenic region_SV |
| 809 | chr9 | 5495895 | 5496373 | CD274-PDCD1LG2 |
| | | | | intergenic region_SV |
| 810 | chr9 | 5496374 | 5496613 | CD274-PDCD1LG2 |
| | | | | intergenic region_SV |
| 811 | chr9 | 5496614 | 5496852 | CD274-PDCD1LG2 |
| | | | | intergenic region_SV |
| 812 | chr9 | 5496853 | 5497092 | CD274-PDCD1LG2 |
| | | | | intergenic region_SV |
| 813 | chr9 | 5497093 | 5497332 | CD274-PDCD1LG2 |
| | | | | intergenic region_SV |
| 814 | chr9 | 5497333 | 5497572 | CD274-PDCD1LG2 |
| | | | | intergenic region_SV |
| 815 | chr9 | 5497573 | 5497812 | CD274-PDCD1LG2 |
| | | | | intergenic region_SV |
| 816 | chr9 | 5497931 | 5498289 | CD274-PDCD1LG2 |
| | | | | intergenic region_SV |
| 817 | chr9 | 5498290 | 5498650 | CD274-PDCD1LG2 |
| | | | | intergenic region_SV |
| 818 | chr9 | 5499008 | 5499248 | CD274-PDCD1LG2 |
| | | | | intergenic region_SV |
| 819 | chr9 | 5499249 | 5499726 | CD274-PDCD1LG2 |
| | | | | intergenic region_SV |
| 820 | chr9 | 5499727 | 5500204 | CD274-PDCD1LG2 |
| | | | | intergenic region_SV |
| 821 | chr9 | 5500205 | 5500682 | CD274-PDCD1LG2 |
| | | | | intergenic region_SV |
| 822 | chr9 | 5500683 | 5501042 | CD274-PDCD1LG2 |
| | | | | intergenic region_SV |
| 823 | chr9 | 5501280 | 5501639 | CD274-PDCD1LG2 |
| | | | | intergenic region_SV |
| 824 | chr9 | 5501640 | 5502118 | CD274-PDCD1LG2 |
| | | | | intergenic region_SV |
| 825 | chr9 | 5502119 | 5502597 | CD274-PDCD1LG2 |
| | | | | intergenic region_SV |
| 826 | chr9 | 5502598 | 5502718 | CD274-PDCD1LG2 |
| | | | | intergenic region_SV |
| 827 | chr9 | 5502719 | 5503076 | CD274-PDCD1LG2 |
| | | | | intergenic region_SV |
| 828 | chr9 | 5503077 | 5503197 | CD274-PDCD1LG2 |
| | | | | intergenic region_SV |
| 829 | chr9 | 5503198 | 5503556 | CD274-PDCD1LG2 |
| | | | | intergenic region_SV |
| 830 | chr9 | 5503557 | 5503916 | CD274-PDCD1LG2 |
| | | | | intergenic region_SV |
| 831 | chr9 | 5504035 | 5504275 | CD274-PDCD1LG2 |
| | | | | intergenic region_SV |
| 832 | chr9 | 5504515 | 5504995 | CD274-PDCD1LG2 |
| | | | | intergenic region_SV |
| 833 | chr9 | 5505115 | 5505593 | CD274-PDCD1LG2 |
| | | | | intergenic region_SV |
| 834 | chr9 | 5505594 | 5506072 | CD274-PDCD1LG2 |
| | | | | intergenic region_SV |
| 835 | chr9 | 5506310 | 5506430 | CD274-PDCD1LG2 |
| | | | | intergenic region_SV |
| 836 | chr9 | 5506549 | 5506669 | CD274-PDCD1LG2 |
| | | | | intergenic region_SV |
| 837 | chr9 | 5506909 | 5507148 | CD274-PDCD1LG2 |
| | | | | intergenic region_SV |
| 838 | chr9 | 5507387 | 5507507 | CD274-PDCD1LG2 |
| | | | | intergenic region_SV |
| 839 | chr9 | 5508107 | 5508585 | CD274-PDCD1LG2 |
| | | | | intergenic region_SV |
| 840 | chr9 | 5508586 | 5509063 | CD274-PDCD1LG2 |
| | | | | intergenic region_SV |
| 841 | chr9 | 5509064 | 5509303 | CD274-PDCD1LG2 |
| | | | | intergenic region_SV |
| 842 | chr9 | 5509304 | 5509543 | CD274-PDCD1LG2 |
| | | | | intergenic region_SV |
| 843 | chr9 | 5509544 | 5509783 | CD274-PDCD1LG2 |
| | | | | intergenic region_SV |
| 844 | chr9 | 5509784 | 5510023 | CD274-PDCD1LG2 |
| | | | | intergenic region_SV |
| 845 | chr9 | 5510263 | 5510501 | CD274-PDCD1LG2 |
| | | | | intergenic region_SV |
| 846 | chr9 | 5510502 | 5510741 | #N/A |
| 847 | chr9 | 5510742 | 5510981 | #N/A |
| 848 | chr9 | 5510982 | 5511461 | #N/A |
| 849 | chr9 | 5511462 | 5511941 | #N/A |
| 850 | chr9 | 5511942 | 5512420 | #N/A |
| 851 | chr9 | 5512421 | 5512660 | #N/A |
| 852 | chr9 | 5512661 | 5512899 | #N/A |
| 853 | chr9 | 5512900 | 5513379 | #N/A |
| 854 | chr9 | 5513380 | 5513619 | #N/A |
| 855 | chr9 | 5513620 | 5513858 | #N/A |
| 856 | chr9 | 5513859 | 5514098 | #N/A |
| 857 | chr9 | 5514099 | 5514337 | #N/A |
| 858 | chr9 | 5514338 | 5514818 | #N/A |
| 859 | chr9 | 5514819 | 5515297 | #N/A |
| 860 | chr9 | 5515298 | 5515657 | PDCD1LG2_SV |
| 861 | chr9 | 5515896 | 5516016 | PDCD1LG2_SV |
| 862 | chr9 | 5516256 | 5516494 | PDCD1LG2_SV |
| 863 | chr9 | 5516495 | 5516734 | #N/A |
| 864 | chr9 | 5516735 | 5516975 | #N/A |
| 865 | chr9 | 5516976 | 5517456 | #N/A |
| 866 | chr9 | 5517457 | 5517936 | #N/A |
| 867 | chr9 | 5517937 | 5518176 | #N/A |
| 868 | chr9 | 5518177 | 5518416 | #N/A |
| 869 | chr9 | 5518417 | 5518656 | #N/A |
| 870 | chr9 | 5518657 | 5518895 | #N/A |
| 871 | chr9 | 5518896 | 5519374 | #N/A |
| 872 | chr9 | 5519375 | 5519853 | #N/A |
| 873 | chr9 | 5519854 | 5520333 | #N/A |
| 874 | chr9 | 5520334 | 5520813 | #N/A |
| 875 | chr9 | 5520814 | 5521292 | #N/A |
| 876 | chr9 | 5521293 | 5521532 | #N/A |
| 877 | chr9 | 5521533 | 5521772 | #N/A |
| 878 | chr9 | 5521773 | 5522012 | #N/A |
| 879 | chr9 | 5522013 | 5522252 | #N/A |
| 880 | chr9 | 5522253 | 5522634 | #N/A |
| 881 | chr9 | 5534744 | 5535050 | #N/A |
| 882 | chr9 | 5549334 | 5549604 | #N/A |
| 883 | chr9 | 5557617 | 5557752 | #N/A |
| 884 | chr9 | 5563126 | 5563389 | #N/A |
| 885 | chr9 | 5563390 | 5563868 | #N/A |
| 886 | chr9 | 5563869 | 5564346 | #N/A |
| 887 | chr9 | 5564347 | 5564824 | #N/A |
| 888 | chr9 | 5564825 | 5565185 | PDCD1LG2_SV |
| 889 | chr9 | 5565423 | 5565780 | PDCD1LG2_SV |
| 890 | chr9 | 5565781 | 5566260 | #N/A |
| 891 | chr9 | 5566261 | 5566738 | #N/A |
| 892 | chr9 | 5566739 | 5567217 | #N/A |
| 893 | chr9 | 5567218 | 5567696 | #N/A |
| 894 | chr9 | 5567697 | 5568174 | #N/A |
| 895 | chr9 | 5568175 | 5568653 | #N/A |
| 896 | chr9 | 5568654 | 5569132 | #N/A |
| 897 | chr9 | 5569133 | 5569610 | #N/A |
| 898 | chr9 | 5569611 | 5569731 | #N/A |
| 899 | chr9 | 5569732 | 5570016 | #N/A |
| 900 | chr9 | 5584428 | 5584787 | PDCD1LG2_SV |
| 901 | chr9 | 5585024 | 5585382 | PDCD1LG2_SV |
| 902 | chr9 | 5585499 | 5585973 | PDCD1LG2_SV |
| 903 | chr9 | 5585974 | 5586450 | #N/A |
| 904 | chr9 | 5586451 | 5586926 | #N/A |
| 905 | chr9 | 5586927 | 5587403 | #N/A |
| 906 | chr9 | 5587404 | 5587881 | PDCD1LG2_SV |
| 907 | chr9 | 5588238 | 5589548 | PDCD1LG2_SV |
| 908 | chr9 | 21968174 | 21968294 | #N/A |
| 909 | chr9 | 21968687 | 21968807 | #N/A |
| 910 | chr9 | 21970900 | 21971207 | #N/A |
| 911 | chr9 | 21974676 | 21974826 | #N/A |
| 912 | chr9 | 21994137 | 21994330 | #N/A |
| 913 | chr9 | 33675244 | 33675364 | MSI50 |
| 914 | chr9 | 33675373 | 33675493 | MSI127 |
| 915 | chr9 | 36840519 | 36840639 | #N/A |
| 916 | chr9 | 36846823 | 36846943 | #N/A |
| 917 | chr9 | 36881991 | 36882111 | #N/A |
| 918 | chr9 | 36923356 | 36923476 | #N/A |
| 919 | chr9 | 36966545 | 36966721 | #N/A |
| 920 | chr9 | 37002649 | 37002769 | #N/A |
| 921 | chr9 | 37006442 | 37006562 | #N/A |
| 922 | chr9 | 37014993 | 37015191 | #N/A |
| 923 | chr9 | 37020632 | 37020798 | #N/A |
| 924 | chr9 | 37033945 | 37034065 | #N/A |
| 925 | chr9 | 136918408 | 136918528 | MSI28 |
| 926 | chr9 | 136918536 | 136918656 | MSI105 |
| 927 | chr10 | 29759995 | 29760115 | MSI58 |
| 928 | chr10 | 29760122 | 29760242 | MSI135 |
| 929 | chr10 | 70182400 | 70182520 | MSI65 |
| 930 | chr10 | 70182529 | 70182649 | MSI142 |
| 931 | chr10 | 89717649 | 89717769 | MSI63 |
| 932 | chr10 | 89717775 | 89717895 | MSI140 |
| 933 | chr10 | 97918735 | 97918855 | MSI52 |
| 934 | chr10 | 97918864 | 97918984 | MSI129 |
| 935 | chr10 | 98336354 | 98336474 | MSI49 |
| 936 | chr10 | 98336482 | 98336602 | MSI126 |
| 937 | chr10 | 111893229 | 111893349 | MSI30 |
| 938 | chr10 | 111893357 | 111893477 | MSI107 |
| 939 | chr11 | 62649408 | 62649528 | MSI25 |
| 940 | chr11 | 62649536 | 62649656 | MSI102 |
| 941 | chr11 | 92498043 | 92498257 | FAT3_TMBREGION_5 |
| 942 | chr11 | 118220462 | 118220582 | MSI23 |
| 943 | chr11 | 118220591 | 118220711 | MSI100 |
| 944 | chr11 | 126136966 | 126137086 | MSI9 |
| 945 | chr11 | 126137094 | 126137214 | MSI86 |
| 946 | chr12 | 416832 | 416952 | MSI70 |
| 947 | chr12 | 416960 | 417080 | MSI147 |
| 948 | chr12 | 11803018 | 11803138 | #N/A |
| 949 | chr12 | 11905388 | 11905508 | #N/A |
| 950 | chr12 | 11962981 | 11963459 | ETV6_SV |
| 951 | chr12 | 11963460 | 11963939 | ETV6_SV |
| 952 | chr12 | 11963940 | 11964418 | ETV6_SV |
| 953 | chr12 | 11964419 | 11964659 | ETV6_SV |
| 954 | chr12 | 11964660 | 11964899 | ETV6_SV |
| 955 | chr12 | 11964900 | 11965139 | ETV6_SV |
| 956 | chr12 | 11965140 | 11965379 | ETV6_SV |
| 957 | chr12 | 11965380 | 11965857 | ETV6_SV |
| 958 | chr12 | 11965858 | 11966336 | ETV6_SV |
| 959 | chr12 | 11966337 | 11966816 | ETV6_SV |
| 960 | chr12 | 11966817 | 11967057 | ETV6_SV |
| 961 | chr12 | 11967058 | 11967296 | ETV6_SV |
| 962 | chr12 | 11967297 | 11967775 | ETV6_SV |
| 963 | chr12 | 11967776 | 11968255 | ETV6_SV |
| 964 | chr12 | 11968256 | 11968735 | ETV6_SV |
| 965 | chr12 | 11968736 | 11968976 | ETV6_SV |
| 966 | chr12 | 11968977 | 11969216 | ETV6_SV |
| 967 | chr12 | 11969456 | 11969815 | ETV6_SV |
| 968 | chr12 | 11969816 | 11970295 | ETV6_SV |
| 969 | chr12 | 11970296 | 11970775 | ETV6_SV |
| 970 | chr12 | 11970776 | 11971136 | ETV6_SV |
| 971 | chr12 | 11971256 | 11971615 | ETV6_SV |
| 972 | chr12 | 11971616 | 11972093 | ETV6_SV |
| 973 | chr12 | 11972094 | 11972572 | ETV6_SV |
| 974 | chr12 | 11972573 | 11973051 | ETV6_SV |
| 975 | chr12 | 11973052 | 11973172 | ETV6_SV |
| 976 | chr12 | 11973173 | 11973530 | ETV6_SV |
| 977 | chr12 | 11973531 | 11974010 | ETV6_SV |
| 978 | chr12 | 11992073 | 11992238 | #N/A |
| 979 | chr12 | 12006360 | 12006495 | #N/A |
| 980 | chr12 | 12022357 | 12022569 | #N/A |
| 981 | chr12 | 12022570 | 12022903 | #N/A |
| 982 | chr12 | 12037378 | 12037521 | #N/A |
| 983 | chr12 | 12038850 | 12038970 | #N/A |
| 984 | chr12 | 12043867 | 12043987 | #N/A |
| 985 | chr12 | 55759365 | 55759485 | MSI36 |
| 986 | chr12 | 55759493 | 55759613 | MSI113 |
| 987 | chr12 | 57422452 | 57422572 | MSI20 |
| 988 | chr12 | 57422580 | 57422700 | MSI97 |
| 989 | chr12 | 57490354 | 57490544 | #N/A |
| 990 | chr12 | 57490637 | 57490757 | #N/A |
| 991 | chr12 | 57490823 | 57490943 | #N/A |
| 992 | chr12 | 57492274 | 57492394 | #N/A |
| 993 | chr12 | 57492570 | 57492690 | #N/A |
| 994 | chr12 | 57492769 | 57492889 | #N/A |
| 995 | chr12 | 57493076 | 57493223 | #N/A |
| 996 | chr12 | 57493549 | 57493686 | #N/A |
| 997 | chr12 | 57493766 | 57493886 | #N/A |
| 998 | chr12 | 57496072 | 57496279 | #N/A |
| 999 | chr12 | 57496598 | 57496718 | #N/A |
| 1000 | chr12 | 57498248 | 57498368 | #N/A |
| 1001 | chr12 | 57498492 | 57498612 | #N/A |
| 1002 | chr12 | 57498933 | 57499122 | #N/A |
| 1003 | chr12 | 57499250 | 57499382 | #N/A |
| 1004 | chr12 | 57499973 | 57500122 | #N/A |
| 1005 | chr12 | 57500277 | 57500397 | #N/A |
| 1006 | chr12 | 57500475 | 57500614 | #N/A |
| 1007 | chr12 | 57500995 | 57501115 | #N/A |
| 1008 | chr12 | 57501387 | 57501526 | #N/A |
| 1009 | chr12 | 57501943 | 57502063 | #N/A |
| 1010 | chr12 | 122242537 | 122242657 | MSI16 |
| 1011 | chr12 | 122242665 | 122242785 | MSI93 |
| 1012 | chr12 | 124319954 | 124320074 | DNAH10_TMBREGION_2 |
| 1013 | chr12 | 133201279 | 133201399 | #N/A |
| 1014 | chr12 | 133201475 | 133201595 | #N/A |
| 1015 | chr12 | 133202233 | 133202353 | #N/A |
| 1016 | chr12 | 133202702 | 133202903 | #N/A |
| 1017 | chr12 | 133208900 | 133209094 | #N/A |
| 1018 | chr12 | 133209249 | 133209381 | #N/A |
| 1019 | chr12 | 133210771 | 133210964 | #N/A |
| 1020 | chr12 | 133212477 | 133212610 | #N/A |
| 1021 | chr12 | 133214602 | 133214722 | #N/A |
| 1022 | chr12 | 133215710 | 133215884 | #N/A |
| 1023 | chr12 | 133218232 | 133218437 | #N/A |
| 1024 | chr12 | 133218762 | 133218983 | #N/A |
| 1025 | chr12 | 133219091 | 133219315 | #N/A |
| 1026 | chr12 | 133219405 | 133219582 | #N/A |
| 1027 | chr12 | 133219803 | 133219923 | #N/A |
| 1028 | chr12 | 133219992 | 133220146 | #N/A |
| 1029 | chr12 | 133220422 | 133220563 | #N/A |
| 1030 | chr12 | 133225514 | 133225658 | #N/A |
| 1031 | chr12 | 133225891 | 133226101 | #N/A |
| 1032 | chr12 | 133226262 | 133226475 | #N/A |
| 1033 | chr12 | 133233723 | 133233843 | #N/A |
| 1034 | chr12 | 133233915 | 133234035 | #N/A |
| 1035 | chr12 | 133234445 | 133234565 | #N/A |
| 1036 | chr12 | 133235880 | 133236095 | #N/A |
| 1037 | chr12 | 133237554 | 133237750 | #N/A |
| 1038 | chr12 | 133238112 | 133238270 | #N/A |
| 1039 | chr12 | 133240589 | 133240734 | #N/A |
| 1040 | chr12 | 133240942 | 133241062 | #N/A |
| 1041 | chr12 | 133241887 | 133242036 | #N/A |
| 1042 | chr12 | 133244088 | 133244234 | #N/A |
| 1043 | chr12 | 133244941 | 133245088 | #N/A |
| 1044 | chr12 | 133245212 | 133245332 | #N/A |
| 1045 | chr12 | 133245401 | 133245521 | #N/A |
| 1046 | chr12 | 133248794 | 133248914 | #N/A |
| 1047 | chr12 | 133249212 | 133249425 | #N/A |
| 1048 | chr12 | 133249746 | 133249866 | #N/A |
| 1049 | chr12 | 133250160 | 133250293 | #N/A |
| 1050 | chr12 | 133251983 | 133252103 | #N/A |
| 1051 | chr12 | 133252303 | 133252423 | #N/A |
| 1052 | chr12 | 133252675 | 133252795 | #N/A |
| 1053 | chr12 | 133253125 | 133253245 | #N/A |
| 1054 | chr12 | 133253929 | 133254049 | #N/A |
| 1055 | chr12 | 133254163 | 133254305 | #N/A |
| 1056 | chr12 | 133256082 | 133256237 | #N/A |
| 1057 | chr12 | 133256526 | 133256646 | #N/A |
| 1058 | chr12 | 133256726 | 133256846 | #N/A |
| 1059 | chr12 | 133257173 | 133257293 | #N/A |
| 1060 | chr12 | 133257723 | 133257865 | #N/A |
| 1061 | chr12 | 133263810 | 133263930 | #N/A |
| 1062 | chr14 | 35871182 | 35871302 | #N/A |
| 1063 | chr14 | 35871599 | 35871869 | #N/A |
| 1064 | chr14 | 35871961 | 35872081 | #N/A |
| 1065 | chr14 | 35872355 | 35872566 | #N/A |
| 1066 | chr14 | 35872890 | 35873010 | #N/A |
| 1067 | chr14 | 35873623 | 35873850 | #N/A |
| 1068 | chr15 | 33991903 | 33992036 | RYR3_TMBREGION_27 |
| 1069 | chr15 | 34018587 | 34018707 | RYR3_TMBREGION_28 |
| 1070 | chr15 | 40862004 | 40862124 | 15q15.3_DLBCL |
| 1071 | chr15 | 41146820 | 41146940 | 15q15.3_DLBCL |
| 1072 | chr15 | 41476149 | 41476269 | 15q15.3_DLBCL |
| 1073 | chr15 | 41634528 | 41634648 | 15q15.3_DLBCL |
| 1074 | chr15 | 41829170 | 41829290 | 15q15.3_DLBCL |
| 1075 | chr15 | 42026704 | 42026824 | 15q15.3_DLBCL |
| 1076 | chr15 | 42211426 | 42211546 | 15q15.3_DLBCL |
| 1077 | chr15 | 42434194 | 42434314 | 15q15.3_DLBCL |
| 1078 | chr15 | 42643469 | 42643589 | 15q15.3_DLBCL |
| 1079 | chr15 | 42820529 | 42820649 | 15q15.3_DLBCL |
| 1080 | chr15 | 43020923 | 43021043 | 15q15.3_DLBCL |
| 1081 | chr15 | 43252704 | 43252824 | 15q15.3_DLBCL |
| 1082 | chr15 | 43545668 | 43545788 | 15q15.3_DLBCL |
| 1083 | chr15 | 43762136 | 43762256 | 15q15.3_DLBCL |
| 1084 | chr15 | 44038839 | 44038959 | 15q15.3_DLBCL |
| 1085 | chr15 | 44227210 | 44227330 | 15q15.3_DLBCL |
| 1086 | chr15 | 44475343 | 44475463 | 15q15.3_DLBCL |
| 1087 | chr15 | 44943697 | 44943817 | 15q15.3_DLBCL |
| 1088 | chr15 | 45003718 | 45003838 | #N/A |
| 1089 | chr15 | 45007620 | 45007899 | #N/A |
| 1090 | chr15 | 45008473 | 45008593 | #N/A |
| 1091 | chr15 | 45047513 | 45047633 | 15q15.3_DLBCL |
| 1092 | chr15 | 64967126 | 64967246 | MSI41 |
| 1093 | chr15 | 64967254 | 64967374 | MSI118 |
| 1094 | chr15 | 79750465 | 79750585 | MSI34 |
| 1095 | chr15 | 79750593 | 79750713 | MSI111 |
| 1096 | chr15 | 91304018 | 91304138 | MSI55 |
| 1097 | chr15 | 91304147 | 91304267 | MSI132 |
| 1098 | chr16 | 10867082 | 10867202 | MSI32 |
| 1099 | chr16 | 10867211 | 10867331 | MSI109 |
| 1100 | chr16 | 10971113 | 10974893 | CIITA_SV |
| 1101 | chr16 | 10975130 | 10975489 | CIITA_SV |
| 1102 | chr16 | 10975490 | 10975969 | CIITA_SV |
| 1103 | chr16 | 10975970 | 10976450 | CIITA_SV |
| 1104 | chr16 | 10976810 | 10977049 | CIITA_SV |
| 1105 | chr16 | 10977050 | 10977290 | CIITA_SV |
| 1106 | chr16 | 10977291 | 10977771 | CIITA_SV |
| 1107 | chr16 | 10977772 | 10978252 | CIITA_SV |
| 1108 | chr16 | 10978492 | 10978971 | CIITA_SV |
| 1109 | chr16 | 10978972 | 10979451 | CIITA_SV |
| 1110 | chr16 | 10979452 | 10979932 | CIITA_SV |
| 1111 | chr16 | 10980052 | 10980411 | CIITA_SV |
| 1112 | chr16 | 10980412 | 10980891 | CIITA_SV |
| 1113 | chr16 | 10980892 | 10981372 | CIITA_SV |
| 1114 | chr16 | 10981611 | 10981970 | CIITA_SV |
| 1115 | chr16 | 10981971 | 10982091 | CIITA_SV |
| 1116 | chr16 | 10982092 | 10982452 | CIITA_SV |
| 1117 | chr16 | 10982453 | 10982573 | CIITA_SV |
| 1118 | chr16 | 10982574 | 10982933 | CIITA_SV |
| 1119 | chr16 | 10982934 | 10983293 | CIITA_SV |
| 1120 | chr16 | 10983294 | 10983414 | CIITA_SV |
| 1121 | chr16 | 10983656 | 10984135 | CIITA_SV |
| 1122 | chr16 | 10984375 | 10984614 | CIITA_SV |
| 1123 | chr16 | 10984615 | 10984855 | CIITA_SV |
| 1124 | chr16 | 10984856 | 10985096 | CIITA_SV |
| 1125 | chr16 | 10985097 | 10985337 | CIITA_SV |
| 1126 | chr16 | 10985338 | 10985576 | CIITA_SV |
| 1127 | chr16 | 10985577 | 10985816 | CIITA_SV |
| 1128 | chr16 | 10985817 | 10985937 | CIITA_SV |
| 1129 | chr16 | 10986176 | 10986416 | CIITA_SV |
| 1130 | chr16 | 10986417 | 10986537 | CIITA_SV |
| 1131 | chr16 | 10986777 | 10987016 | CIITA_SV |
| 1132 | chr16 | 10987017 | 10987376 | CIITA_SV |
| 1133 | chr16 | 10987617 | 10987857 | CIITA_SV |
| 1134 | chr16 | 10987977 | 10988336 | CIITA_SV |
| 1135 | chr16 | 10988337 | 10988816 | CIITA_SV |
| 1136 | chr16 | 10988817 | 10989297 | CIITA_SV |
| 1137 | chr16 | 10989513 | 10989633 | CIITA |
| 1138 | chr16 | 10992498 | 10992618 | CIITA |
| 1139 | chr16 | 10992760 | 10992880 | CIITA |
| 1140 | chr16 | 10995333 | 10995453 | CIITA |
| 1141 | chr16 | 10995894 | 10996041 | CIITA |
| 1142 | chr16 | 10996514 | 10996658 | CIITA |
| 1143 | chr16 | 10997587 | 10997752 | CIITA |
| 1144 | chr16 | 10998575 | 10998695 | CIITA |
| 1145 | chr16 | 11000355 | 11000707 | CIITA |
| 1146 | chr16 | 11000708 | 11001177 | CIITA |
| 1147 | chr16 | 11001178 | 11001649 | CIITA |
| 1148 | chr16 | 11001650 | 11002006 | CIITA |
| 1149 | chr16 | 11002839 | 11003044 | CIITA |
| 1150 | chr16 | 11004020 | 11004140 | CIITA |
| 1151 | chr16 | 11004330 | 11004689 | CIITA |
| 1152 | chr16 | 11004690 | 11005050 | CIITA |
| 1153 | chr16 | 11005290 | 11005410 | CIITA_SV |
| 1154 | chr16 | 11009407 | 11009527 | CIITA_SV |
| 1155 | chr16 | 11010210 | 11010330 | CIITA_SV |
| 1156 | chr16 | 11012280 | 11012400 | CIITA_SV |
| 1157 | chr16 | 11016005 | 11016125 | CIITA_SV |
| 1158 | chr16 | 11016245 | 11016365 | CIITA_SV |
| 1159 | chr16 | 11017062 | 11017182 | CIITA_SV |
| 1160 | chr16 | 11348699 | 11349007 | SOCS1 |
| 1161 | chr16 | 11349008 | 11349335 | SOCS1 |
| 1162 | chr16 | 27351499 | 27351619 | IL4R |
| 1163 | chr16 | 27352562 | 27352682 | IL4R |
| 1164 | chr16 | 27353441 | 27353580 | IL4R |
| 1165 | chr16 | 27356189 | 27356341 | IL4R |
| 1166 | chr16 | 27357787 | 27357939 | IL4R |
| 1167 | chr16 | 27363860 | 27364017 | IL4R |
| 1168 | chr16 | 27367118 | 27367238 | IL4R |
| 1169 | chr16 | 27370216 | 27370336 | IL4R |
| 1170 | chr16 | 27372051 | 27372171 | IL4R |
| 1171 | chr16 | 27373572 | 27373907 | IL4R |
| 1172 | chr16 | 27373908 | 27374357 | IL4R |
| 1173 | chr16 | 27374358 | 27374806 | IL4R |
| 1174 | chr16 | 27374807 | 27375151 | IL4R |
| 1175 | chr16 | 67645218 | 67645338 | MSI62 |
| 1176 | chr16 | 67645345 | 67645465 | MSI139 |
| 1177 | chr16 | 85682169 | 85682289 | MSI31 |
| 1178 | chr16 | 85682297 | 85682417 | MSI108 |
| 1179 | chr17 | 7572907 | 7573027 | TP53 |
| 1180 | chr17 | 7573920 | 7574040 | TP53 |
| 1181 | chr17 | 7576537 | 7576657 | TP53 |
| 1182 | chr17 | 7576829 | 7576949 | TP53 |
| 1183 | chr17 | 7577018 | 7577155 | TP53 |
| 1184 | chr17 | 7577493 | 7577613 | TP53 |
| 1185 | chr17 | 7578173 | 7578293 | TP53 |
| 1186 | chr17 | 7578370 | 7578554 | TP53 |
| 1187 | chr17 | 7579311 | 7579590 | TP53 |
| 1188 | chr17 | 7579650 | 7579770 | TP53 |
| 1189 | chr17 | 7579815 | 7579935 | TP53 |
| 1190 | chr17 | 7623052 | 7623218 | DNAH2 |
| 1191 | chr17 | 7626916 | 7627036 | DNAH2 |
| 1192 | chr17 | 7630439 | 7630610 | DNAH2 |
| 1193 | chr17 | 7636404 | 7636633 | DNAH2 |
| 1194 | chr17 | 7637496 | 7637616 | DNAH2 |
| 1195 | chr17 | 7637787 | 7638026 | DNAH2 |
| 1196 | chr17 | 7640384 | 7640576 | DNAH2 |
| 1197 | chr17 | 7643050 | 7643256 | DNAH2 |
| 1198 | chr17 | 7643742 | 7643862 | DNAH2 |
| 1199 | chr17 | 7644127 | 7644310 | DNAH2 |
| 1200 | chr17 | 7646245 | 7646460 | DNAH2 |
| 1201 | chr17 | 7660408 | 7660555 | DNAH2 |
| 1202 | chr17 | 7661812 | 7661969 | DNAH2 |
| 1203 | chr17 | 7662202 | 7662442 | DNAH2 |
| 1204 | chr17 | 7662739 | 7662928 | DNAH2 |
| 1205 | chr17 | 7663108 | 7663256 | DNAH2 |
| 1206 | chr17 | 7664057 | 7664250 | DNAH2 |
| 1207 | chr17 | 7667148 | 7667349 | DNAH2 |
| 1208 | chr17 | 7667434 | 7667591 | DNAH2 |
| 1209 | chr17 | 7668708 | 7668883 | DNAH2 |
| 1210 | chr17 | 7669635 | 7669799 | DNAH2 |
| 1211 | chr17 | 7671217 | 7671379 | DNAH2 |
| 1212 | chr17 | 7671473 | 7671593 | DNAH2 |
| 1213 | chr17 | 7673569 | 7673726 | DNAH2 |
| 1214 | chr17 | 7673856 | 7673976 | DNAH2 |
| 1215 | chr17 | 7674070 | 7674251 | DNAH2 |
| 1216 | chr17 | 7674647 | 7674786 | DNAH2 |
| 1217 | chr17 | 7678076 | 7678294 | DNAH2 |
| 1218 | chr17 | 7678549 | 7678669 | DNAH2 |
| 1219 | chr17 | 7679344 | 7679464 | DNAH2 |
| 1220 | chr17 | 7680092 | 7680212 | DNAH2 |
| 1221 | chr17 | 7680763 | 7680952 | DNAH2 |
| 1222 | chr17 | 7681386 | 7681506 | DNAH2 |
| 1223 | chr17 | 7681597 | 7681787 | DNAH2 |
| 1224 | chr17 | 7682560 | 7682741 | DNAH2 |
| 1225 | chr17 | 7683478 | 7683598 | DNAH2 |
| 1226 | chr17 | 7683947 | 7684100 | DNAH2 |
| 1227 | chr17 | 7684362 | 7684482 | DNAH2 |
| 1228 | chr17 | 7689441 | 7689660 | DNAH2 |
| 1229 | chr17 | 7689886 | 7690006 | DNAH2 |
| 1230 | chr17 | 7690214 | 7690351 | DNAH2 |
| 1231 | chr17 | 7691177 | 7691315 | DNAH2 |
| 1232 | chr17 | 7691403 | 7691562 | DNAH2 |
| 1233 | chr17 | 7695234 | 7695387 | DNAH2 |
| 1234 | chr17 | 7695555 | 7695675 | DNAH2 |
| 1235 | chr17 | 7695974 | 7696173 | DNAH2 |
| 1236 | chr17 | 7696298 | 7696523 | DNAH2 |
| 1237 | chr17 | 7697564 | 7697684 | DNAH2 |
| 1238 | chr17 | 7699781 | 7699970 | DNAH2 |
| 1239 | chr17 | 7700476 | 7700596 | DNAH2 |
| 1240 | chr17 | 7700723 | 7700843 | DNAH2 |
| 1241 | chr17 | 7700997 | 7701147 | DNAH2 |
| 1242 | chr17 | 7701474 | 7701642 | DNAH2 |
| 1243 | chr17 | 7701875 | 7702036 | DNAH2 |
| 1244 | chr17 | 7702420 | 7702560 | DNAH2 |
| 1245 | chr17 | 7704895 | 7705028 | DNAH2 |
| 1246 | chr17 | 7705195 | 7705335 | DNAH2 |
| 1247 | chr17 | 7707573 | 7707784 | DNAH2 |
| 1248 | chr17 | 7708274 | 7708394 | DNAH2 |
| 1249 | chr17 | 7708569 | 7708711 | DNAH2 |
| 1250 | chr17 | 7710467 | 7710637 | DNAH2 |
| 1251 | chr17 | 7710786 | 7710906 | DNAH2 |
| 1252 | chr17 | 7719888 | 7720053 | DNAH2 |
| 1253 | chr17 | 7720610 | 7720730 | DNAH2 |
| 1254 | chr17 | 7720878 | 7721027 | DNAH2 |
| 1255 | chr17 | 7721081 | 7721201 | DNAH2 |
| 1256 | chr17 | 7721263 | 7721414 | DNAH2 |
| 1257 | chr17 | 7721629 | 7721778 | DNAH2 |
| 1258 | chr17 | 7721960 | 7722094 | DNAH2 |
| 1259 | chr17 | 7722236 | 7722381 | DNAH2 |
| 1260 | chr17 | 7722526 | 7722726 | DNAH2 |
| 1261 | chr17 | 7724564 | 7724684 | DNAH2 |
| 1262 | chr17 | 7726759 | 7726946 | DNAH2 |
| 1263 | chr17 | 7727151 | 7727300 | DNAH2 |
| 1264 | chr17 | 7727438 | 7727622 | DNAH2 |
| 1265 | chr17 | 7727854 | 7728045 | DNAH2 |
| 1266 | chr17 | 7733617 | 7733809 | DNAH2 |
| 1267 | chr17 | 7733975 | 7734160 | DNAH2 |
| 1268 | chr17 | 7734403 | 7734632 | DNAH2 |
| 1269 | chr17 | 7734707 | 7734859 | DNAH2 |
| 1270 | chr17 | 7734976 | 7735096 | DNAH2 |
| 1271 | chr17 | 7735896 | 7736073 | DNAH2 |
| 1272 | chr17 | 7736149 | 7736269 | DNAH2 |
| 1273 | chr17 | 7736388 | 7736539 | DNAH2 |
| 1274 | chr17 | 7736696 | 7736851 | DNAH2 |
| 1275 | chr17 | 7798644 | 7798764 | MSI40 |
| 1276 | chr17 | 7798771 | 7798891 | MSI117 |
| 1277 | chr17 | 37922042 | 37922391 | IKZF3 |
| 1278 | chr17 | 37922392 | 37922746 | IKZF3 |
| 1279 | chr17 | 37933902 | 37934022 | IKZF3 |
| 1280 | chr17 | 37944509 | 37944629 | IKZF3 |
| 1281 | chr17 | 37947668 | 37947836 | IKZF3 |
| 1282 | chr17 | 37948925 | 37949186 | IKZF3 |
| 1283 | chr17 | 37985630 | 37985750 | IKZF3 |
| 1284 | chr17 | 37988317 | 37988437 | IKZF3 |
| 1285 | chr17 | 38020316 | 38020436 | IKZF3 |
| 1286 | chr17 | 42756132 | 42756252 | MSI68 |
| 1287 | chr17 | 42756261 | 42756381 | MSI145 |
| 1288 | chr17 | 48433846 | 48433966 | MSI33 |
| 1289 | chr17 | 48433973 | 48434093 | MSI110 |
| 1290 | chr17 | 56435040 | 56435160 | MSI2 |
| 1291 | chr17 | 56435167 | 56435287 | MSI79 |
| 1292 | chr17 | 63010374 | 63010599 | GNA13 |
| 1293 | chr17 | 63010600 | 63010947 | GNA13 |
| 1294 | chr17 | 63014336 | 63014456 | GNA13 |
| 1295 | chr17 | 63049619 | 63049846 | GNA13 |
| 1296 | chr17 | 63052428 | 63052711 | GNA13 |
| 1297 | chr18 | 7042137 | 7042257 | LAMA1_TMBREGION_13 |
| 1298 | chr18 | 20572732 | 20572852 | MSI45 |
| 1299 | chr18 | 20572861 | 20572981 | MSI122 |
| 1300 | chr18 | 56338875 | 56339084 | MALT1 |
| 1301 | chr18 | 56348401 | 56348568 | MALT1 |
| 1302 | chr18 | 56363598 | 56363718 | MALT1 |
| 1303 | chr18 | 56367672 | 56367823 | MALT1 |
| 1304 | chr18 | 56376609 | 56376788 | MALT1 |
| 1305 | chr18 | 56377196 | 56377316 | MALT1 |
| 1306 | chr18 | 56378109 | 56378229 | MALT1 |
| 1307 | chr18 | 56381268 | 56381388 | MALT1 |
| 1308 | chr18 | 56383123 | 56383243 | MALT1 |
| 1309 | chr18 | 56390279 | 56390483 | MALT1 |
| 1310 | chr18 | 56400628 | 56400806 | MALTI |
| 1311 | chr18 | 56401516 | 56401636 | MALT1 |
| 1312 | chr18 | 56402437 | 56402557 | MALT1 |
| 1313 | chr18 | 56409096 | 56409246 | MALT1 |
| 1314 | chr18 | 56411569 | 56411727 | MALT1 |
| 1315 | chr18 | 56412900 | 56413020 | MALT1 |
| 1316 | chr18 | 56414636 | 56415074 | MALT1 |
| 1317 | chr18 | 57013073 | 57013193 | MSI6 |
| 1318 | chr18 | 57013202 | 57013322 | MSI83 |
| 1319 | chr18 | 60795857 | 60795992 | BCL2 |
| 1320 | chr18 | 60985281 | 60985579 | BCL2 |
| 1321 | chr18 | 60985580 | 60985899 | BCL2 |
| 1322 | chr18 | 60999014 | 60999134 | KDSR |
| 1323 | chr18 | 61002480 | 61002600 | KDSR |
| 1324 | chr18 | 61006014 | 61006134 | KDSR |
| 1325 | chr18 | 61011624 | 61011744 | KDSR |
| 1326 | chr18 | 61018120 | 61018312 | KDSR |
| 1327 | chr18 | 61022424 | 61022544 | KDSR |
| 1328 | chr18 | 61022703 | 61022823 | KDSR |
| 1329 | chr18 | 61026937 | 61027057 | KDSR |
| 1330 | chr18 | 61029996 | 61030116 | KDSR |
| 1331 | chr18 | 61034237 | 61034357 | KDSR |
| 1332 | chr18 | 67991904 | 67992246 | SOCS6 |
| 1333 | chr18 | 67992247 | 67992704 | SOCS6 |
| 1334 | chr18 | 67992705 | 67993162 | SOCS6 |
| 1335 | chr18 | 67993163 | 67993512 | SOCS6 |
| 1336 | chr19 | 8973970 | 8974104 | MUC16_TMBREGION_22 |
| 1337 | chr19 | 8976740 | 8976860 | MUC16_TMBREGION_20 |
| 1338 | chr19 | 9003568 | 9003688 | MUC16_TMBREGION_23 |
| 1339 | chr19 | 9014530 | 9014706 | MUC16_TMBREGION_21 |
| 1340 | chr19 | 9024824 | 9025000 | MUC16_TMBREGION_24 |
| 1341 | chr19 | 39006725 | 39006859 | RYR1_TMBREGION_26 |
| 1342 | chr19 | 49458850 | 49458970 | MSI18 |
| 1343 | chr19 | 49458978 | 49459098 | MSI95 |
| 1344 | chr19 | 49850352 | 49850472 | MSI15 |
| 1345 | chr19 | 49850480 | 49850600 | MSI92 |
| 1346 | chr19 | 50902108 | 50902310 | POLD1 |
| 1347 | chr19 | 50902624 | 50902744 | POLD1 |
| 1348 | chr19 | 50905034 | 50905181 | POLD1 |
| 1349 | chr19 | 50905258 | 50905378 | POLD1 |
| 1350 | chr19 | 50905461 | 50905630 | POLD1 |
| 1351 | chr19 | 50905691 | 50905811 | POLD1 |
| 1352 | chr19 | 50905873 | 50905993 | POLD1 |
| 1353 | chr19 | 50906309 | 50906476 | POLD1 |
| 1354 | chr19 | 50906742 | 50906862 | POLD1 |
| 1355 | chr19 | 50909438 | 50909579 | POLD1 |
| 1356 | chr19 | 50909659 | 50909779 | POLD1 |
| 1357 | chr19 | 50910239 | 50910431 | POLD1 |
| 1358 | chr19 | 50910568 | 50910688 | POLD1 |
| 1359 | chr19 | 50912040 | 50912160 | POLD1 |
| 1360 | chr19 | 50912375 | 50912495 | POLD1 |
| 1361 | chr19 | 50912775 | 50912923 | POLD1 |
| 1362 | chr19 | 50916670 | 50916790 | POLD1 |
| 1363 | chr19 | 50916998 | 50917136 | POLD1 |
| 1364 | chr19 | 50918071 | 50918247 | POLD1 |
| 1365 | chr19 | 50918694 | 50918847 | POLD1 |
| 1366 | chr19 | 50918972 | 50919092 | POLD1 |
| 1367 | chr19 | 50919652 | 50919785 | POLD1 |
| 1368 | chr19 | 50919863 | 50919983 | POLD1 |
| 1369 | chr19 | 50920268 | 50920388 | POLD1 |
| 1370 | chr19 | 50920417 | 50920537 | POLD1 |
| 1371 | chr19 | 50921091 | 50921211 | POLD1 |
| 1372 | chr20 | 47858383 | 47858503 | MSI13 |
| 1373 | chr20 | 47858511 | 47858631 | MSI90 |
| 1374 | chr20 | 49127036 | 49127156 | #N/A |
| 1375 | chr20 | 49177885 | 49178005 | #N/A |
| 1376 | chr20 | 49181496 | 49181616 | #N/A |
| 1377 | chr20 | 49184906 | 49185026 | #N/A |
| 1378 | chr20 | 49191053 | 49191191 | #N/A |
| 1379 | chr20 | 49194956 | 49195166 | #N/A |
| 1380 | chr20 | 49195704 | 49195866 | #N/A |
| 1381 | chr20 | 49196239 | 49196463 | #N/A |
| 1382 | chr20 | 49197801 | 49197997 | #N/A |
| 1383 | chr20 | 49199180 | 49199300 | #N/A |
| 1384 | chr20 | 49508083 | 49508203 | MSI37 |
| 1385 | chr20 | 49508211 | 49508331 | MSI114 |
| 1386 | chr20 | 52188277 | 52188397 | #N/A |
| 1387 | chr20 | 52192265 | 52192503 | #N/A |
| 1388 | chr20 | 52192504 | 52192981 | #N/A |
| 1389 | chr20 | 52192982 | 52193459 | #N/A |
| 1390 | chr20 | 52193460 | 52193819 | #N/A |
| 1391 | chr20 | 52194871 | 52194991 | #N/A |
| 1392 | chr20 | 52197999 | 52198451 | #N/A |
| 1393 | chr20 | 52198452 | 52198904 | #N/A |
| 1394 | chr20 | 52198905 | 52199365 | #N/A |
| 1395 | chr20 | 55966637 | 55966874 | #N/A |
| 1396 | chr20 | 55967711 | 55967831 | #N/A |
| 1397 | chr20 | 55968302 | 55968422 | #N/A |
| 1398 | chr20 | 55982598 | 55982902 | #N/A |
| 1399 | chr20 | 58466926 | 58467046 | MSI74 |
| 1400 | chr20 | 58467055 | 58467175 | MSI151 |
| 1401 | chr21 | 38524122 | 38524242 | MSI43 |
| 1402 | chr21 | 38524250 | 38524370 | MSI120 |
| 1403 | chr21 | 41459096 | 41459216 | DSCAM_TMBREGION_4 |
| 1404 | chr22 | 23230233 | 23230439 | #N/A |
| 1405 | chr22 | 23235879 | 23235999 | #N/A |
| 1406 | chr22 | 23237554 | 23237874 | #N/A |
| 1407 | chr22 | 37318227 | 37318347 | #N/A |
| 1408 | chr22 | 37319287 | 37319407 | #N/A |
| 1409 | chr22 | 37322028 | 37322219 | #N/A |
| 1410 | chr22 | 37325443 | 37325601 | #N/A |
| 1411 | chr22 | 37325680 | 37325849 | #N/A |
| 1412 | chr22 | 37326416 | 37326552 | #N/A |
| 1413 | chr22 | 37326714 | 37326872 | #N/A |
| 1414 | chr22 | 37328806 | 37328946 | #N/A |
| 1415 | chr22 | 37329873 | 37330036 | #N/A |
| 1416 | chr22 | 37331378 | 37331498 | #N/A |
| 1417 | chr22 | 37331640 | 37331760 | #N/A |
| 1418 | chr22 | 37332582 | 37332702 | #N/A |
| 1419 | chr22 | 37333418 | 37333752 | #N/A |
| 1420 | chr22 | 37333753 | 37334199 | #N/A |
| 1421 | chr22 | 37334200 | 37334544 | #N/A |
| 1422 | chrX | 13764825 | 13764945 | MSI64 |
| 1423 | chrX | 13764954 | 13765074 | MSI141 |
| 1424 | chrX | 37312490 | 37312610 | MSI19 |
| 1425 | chrX | 37312618 | 37312738 | MSI96 |
| 1426 | chrX | 105937135 | 105937255 | MSI54 |
| 1427 | chrX | 105937263 | 105937383 | MSI131 |
| 1428 | chrX | 129189890 | 129190010 | MSI69 |
| 1429 | chrX | 129190017 | 129190137 | MSI146 |
| 1430 | chrX | 135494415 | 135494535 | GPR112_TMBREGION_8 |

TABLE 2
Baits for detection of the Epstein-Barr virus.

| SEQ | |
|---|---|
| ID | |
| NO | Bait Description |
| 1431 | EBV_LMP1_NC_007605_1_167702_169016_Human_ |
| | gammaherpesvirus_4_0_1200 |
| 1432 | EBV_LMP1_AY961628_3_167613_to_168357_Human_ |
| | herpesvirus_4_strain_GD1__0_720 |
| 1433 | EBV_LMP1_HQ020558_1_c163432_162195_Human_ |
| | herpesvirus_4_strain_GD2_0_600 |
| 1434 | EBV_LMP1_NC_007605_1_167702_169016_Human_ |
| | gammaherpesvirus_4_0_1200 |
| 1435 | EBV_LMP1_DQ279927_1_c169948_169188_Human_ |
| | herpesvirus_4_strain_AG876_0_720 |
| 1436 | EBV_LMP1_NC_007605_1_167702_169016_Human_ |
| | gammaherpesvirus_4_0_1200 |
| 1437 | EBV_EBNA1_DQ279927_1_96492_98417_Huma_ |
| | herpesvirus_4_strain_AG876_1200_1920 |
| 1438 | EBV_LMP1_NC_007605_1_167702_169016_Human_ |
| | gammaherpesvirus_4_0_1200 |
| 1439 | EBV_EBNA1_JQ009376_2_95779_97209Human_herpesvirus_ |
| | 4_strain_HKNPC1_480_1320 |
| 1440 | EBV_EBNA1_JQ009376_2_95779_97209Human_herpesvirus_ |
| | 4_strain_HKNPC1_480_1320 |
| 1441 | EBV_EBNA1_JQ009376_2_95779_97209Human_herpesvirus_ |
| | 4_strain_HKNPC1_480_1320 |
| 1442 | EBV_LMP1_AY961628_3_167613_to_168357_Human_ |
| | herpesvirus_4_strain_GD1__0_720 |
| 1443 | EBV_LMP1_HQ020558_1_c163432_162195_Human_ |
| | herpesvirus_4_strain_GD2_0_600 |
| 1444 | EBV_LMP1_AY961628_3_167613_to_168357_Human_ |
| | herpesvirus_4_strain_GD1__0_720 |
| 1445 | EBV_LMP1_HQ020558_1_c163432_162195_Human_ |
| | herpesvirus_4_strain_GD2_960_1200 |
| 1446 | EBV_LMP1_DQ279927_1_c169948_169188_Human_ |
| | herpesvirus_4_strain_AG876_0_720 |
| 1447 | EBV_LMP1_JQ009376_2_168596_167294_Human_ |
| | herpesvirus_4_strain_HKNPC1_960_1200 |
| 1448 | EBV_LMP1_JQ009376_2_c168596_167294_Human_ |
| | herpesvirus_4_strain_HKNPC1_0_1200 |
| 1449 | EBV_LMP1_NC_007605_1_167702_169016_Human_ |
| | gammaherpesvirus_4_0_1200 |
| 1450 | EBV_LMP1_JQ009376_2_168596_167294_Human_ |
| | herpesvirus_4_strain_HKNPC1_960_1200 |
| 1451 | EBV_EBNA1_HQ020558_1_93224_94907_Human_ |
| | herpesvirus_4_strain_GD2_840_1200 |
| 1452 | EBV_EBNA1_DQ279927_1_96492_98417_Huma_ |
| | herpesvirus_4_strain_AG876_1200_1920 |
| 1453 | EBV_LMP1_NC_007605_1_167702_169016_Human_ |
| | gammaherpesvirus_4_0_1200 |
| 1454 | EBV_LMP1_HQ020558_1_c163432_162195_Human_ |
| | herpesvirus_4_strain_GD2_960_1200 |
| 1455 | EBV_EBNA1_DQ279927_1_96492_98417_Huma_ |
| | herpesvirus_4_strain_AG876_0_240 |
| 1456 | EBV_LMP1_DQ279927_1_c169948_169188_Human_ |
| | herpesvirus_4_strain_AG876_0_720 |
| 1457 | EBV_LMP1_NC_007605_1_167702_169016_Human_ |
| | gammaherpesvirus_4_0_1200 |
| 1458 | EBV_EBNA1_DQ279927_1_96492_98417_Huma_ |
| | herpesvirus_4_strain_AG876_1200_1920 |
| 1459 | EBV_EBNA1_HQ020558_1_93224_94907_Human_ |
| | herpesvirus_4_strain_GD2_840_1200 |
| 1460 | EBV_EBNA1_HQ020558_1_93224_94907_Human_ |
| | herpesvirus_4_strain_GD2_0_240 |
| 1461 | EBV_LMP1_DQ279927_1_c169948_169188_Human_ |
| | herpesvirus_4_strain_AG876_0_720 |
| 1462 | EBV_EBNA1_V01555_2_107950_109875_Epstein_Barr_ |
| | virus__EBV__genome_strain_B95_8_1440_1920 |
| 1463 | EBV_EBNA1_AY961628_3_95580_97505_Human_ |
| | herpesvirus_4_strain_GD1_1320_1560 |
| 1464 | EBV_EBNA1_DQ279927_1_96492_98417_ |
| | Huma_herpesvirus_4_strain_AG876_1200_1920 |
| 1465 | EBV_EBNA1_V01555_2_107950_109875_Epstein_ |
| | Barr_virus__EBV__genome_strain_B95_8_1440_1920 |
| 1466 | EBV_EBNA1_JQ009376_2_95779_97209Human_ |
| | herpesvirus_4_strain_HKNPC1_480_1320 |
| 1467 | EBV_EBNA1_JQ009376_2_95779_97209Human_ |
| | herpesvirus_4_strain_HKNPC1_480_1320 |
| 1468 | EBV_LMP1_DQ279927_1_c169948_169188_Human_ |
| | herpesvirus_4_strain_AG876_0_720 |
| 1469 | EBV_LMP1_NC_007605_1_167702_169016_Human_ |
| | gammaherpesvirus_4_0_1200 |
| 1470 | EBV_EBNA1_DQ279927_1_96492_98417_Huma_ |
| | herpesvirus_4_strain_AG876_0_240 |
| 1471 | EBV_LMP1_JQ009376_2_c168596_167294_Human_ |
| | herpesvirus_4_strain_HKNPC1_0_1200 |
| 1472 | EBV_LMP1_AY961628_3_167613_to_168357_Human_ |
| | herpesvirus_4_strain_GD1__0_720 |
| 1473 | EBV_LMP1_HQ020558_1_c163432_162195_ |
| | Human_herpesvirus_4_strain_GD2_0_600 |
| 1474 | EBV_EBNA1_V01555_2_107950_109875_Epstein_ |
| | Barr_virus__EBV__genome_strain_B95_8_1440_1920 |
| 1475 | EBV_EBNA1_JQ009376_2_95779_97209Human_ |
| | herpesvirus_4_strain_HKNPC1_480_1320 |
| 1476 | EBV_LMP1_V01555_2_168286_168964_Human_ |
| | herpesvirus_4_strain_B95_8_0_240 |
| 1477 | EBV_LMP1_V01555_2_168286_168964_Human_ |
| | herpesvirus_4_strain_B95_8_0_240 |
| 1478 | EBV_EBNA1_AY961628_3_95580_97505_Human_ |
| | herpesvirus_4_strain_GD1_1320_1560 |
| 1479 | EBV_EBNA1_V01555_2_107950_109875_Epstein_ |
| | Barr_virus__EBV__genome_strain_B95_8_1440_1920 |
| 1480 | EBV_LMP1_DQ279927_1_c169948_169188_Human_ |
| | herpesvirus_4_strain_AG876_0_720 |
| 1481 | EBV_LMP1_AY961628_3_167613_to_168357_Human_ |
| | herpesvirus_4_strain_GD1__0_720 |
| 1482 | EBV_LMP1_HQ020558_1_c163432_162195_Human_ |
| | herpesvirus_4_strain_GD2_0_600 |
| 1483 | EBV_LMP1_AY961628_3_167613_to_168357_Human_ |
| | herpesvirus_4_strain_GD1__0_720 |
| 1484 | EBV_EBNA1_HQ020558_1_93224_94907_Human_ |
| | herpesvirus_4_strain_GD2_0_240 |
| 1485 | EBV_LMP1_DQ279927_1_c170457_170190_Human_ |
| | herpesvirus_4_strain_AG876_0_240 |
| 1486 | EBV_LMP1_HQ020558_1_c163432_162195_Human_ |
| | herpesvirus_4_strain_GD2_0_600 |
| 1487 | EBV_EBNA1_JQ009376_2_95779_97209Human_ |
| | herpesvirus_4_strain_HKNPC1_480_1320 |
| 1488 | EBV_LMP1_DQ279927_1_c170457_170190_Human_ |
| | herpesvirus_4_strain_AG876_0_240 |
| 1489 | EBV_LMP1_NC_007605_1_167702_169016_Human_ |
| | gammaherpesvirus_4_0_1200 |
| 1490 | EBV_EBNA1_DQ279927_1_96492_98417_Huma_ |
| | herpesvirus_4_strain_AG876_1200_1920 |
| 1491 | EBV_LMP1_HQ020558_1_c163432_162195_Human_ |
| | herpesvirus_4_strain_GD2_720_840 |
| 1492 | EBV_EBNA1_HQ020558_1_93224_94907_Human_ |
| | herpesvirus_4_strain_GD2_1320_1440 |
| 1493 | EBV_LMP1_V01555_2_168286_168964_Human_ |
| | herpesvirus_4_strain_B95_8_480_600 |
| 1494 | EBV_EBNA1_V01555_2_107950_109875_Epstein_Barr_ |
| | virus__EBV__genome_strain_B95_8_0_120 |
| 1495 | EBV_EBNA1_NC_007605_1_95662_97587_Human_ |
| | gammaherpesvirus_4_1080_1920 |
| 1496 | EBV_EBNA1_NC_007605_1_95662_97587_Human_ |
| | gammaherpesvirus_4_0_240 |
| 1497 | EBV_EBNA1_V01555_2_107950_109875_Epstein_Barr_ |
| | virus__EBV__genome_strain_B95_8_1080_1200 |
| 1498 | EBV_EBNA1_AY961628_3_95580_97505_Human_ |
| | herpesvirus_4_strain_GD1_1080_1200 |
| 1499 | EBV_LMP1_JQ009376_2_c168596_167294_Human_ |
| | herpesvirus_4_strain_HKNPC1_0_1200 |
| 1500 | EBV_EBNA1_AY961628_3_95580_97505_Human_ |
| | herpesvirus_4_strain_GD1_1680_1920 |
| 1501 | EBV_LMP1_AY961628_3_168601_to_168868_Human_ |
| | herpesvirus_4_strain_GD1__0_240 |
| 1502 | EBV_LMP1_JQ009376_2_168596_167294_Human_ |
| | herpesvirus_4_strain_HKNPC1_600_720 |

### Example 4: Computational Pipeline and Characterization of Molecular Tumor Burden

[0319] A computational pipeline was developed for use with the targeted sequencing panel to allow for the characterization of molecular tumor burden for a subject.

[0320] The strategy developed for sequencing of ctDNA samples and computational analyses of the resulting data is shown in FIG. 23 (see, Adalsteinsson V A, et al. Scalable whole-exome sequencing of cell-free DNA reveals high concordance with metastatic tumors. Nature communications. 2017; 8(1):1324. Epub 2017/11/08. doi: 10.1038/s41467-017-00965-y. PubMed PMID: 29109393; PMCID: PMC5673918; Cibulskis K, et al. Sensitive detection of somatic point mutations in impure and heterogeneous cancer samples. Nat Biotechnol. 2013; 31(3):213-9. Epub 20130210. doi: 10.1038/nbt.2514. PubMed PMID: 23396013: PMCID: PMC3833702; Benjamin D, et al. Calling Somatic SNVs and Indels with Mutect2. BioRxiv 861054; posted Dec. 2, 2019; Saunders C T, et al. Strelka: accurate somatic small-variant calling from sequenced tumor-normal sample pairs. Bioinformatics. 2012; 28(14):1811-7. Epub 20120510. doi: 10.1093/bioinformatics/bts271. PubMed PMID: 22581179; Wala J A, et al. SvABA: genome-wide detection of structural variants and indels by local assembly. Genome Res. 2018; 28(4):581-91. Epub 2018/03/15. doi: 10.1101/gr.221028.117. PubMed PMID: 29535149; PMCID: PMC5880247; and Chen X, et al. Manta: rapid detection of structural variants and indels for germline and cancer sequencing applications. Bioinformatics. 2016; 32(8):1220-2. Epub 20151208. doi: 10.1093/bioinformatics/btv710. PubMed PMID: 26647377).

[0321] The computational pipeline combined evidence from two data types: Low pass (˜0.2×) whole genome sequencing (WGS) (LP WGS) and targeted sequencing (FIG. 23). LP WGS allowed an estimate of the genome-wide CNA profile as well as an estimate of tumor fraction (TF). From the targeted panel sequencing, at high coverage with duplex reads, the pipeline provided high precision detection of driver gene mutations, SCNAs, SVs, as well as other targeted sites that help estimate mutational signatures (FIG. 23). The pipeline used some computer programs specifically designed for these data types (FIG. 23). Some computer programs (such as Mutect1) were optimized for the deep coverage in the targeted sequencing panel and higher base qualities of duplex reads.

[0322] For the LP WGS data, iChorCNA (Adalsteinsson V A, et al. Scalable whole-exome sequencing of cell-free DNA reveals high concordance with metastatic tumors. Nature communications. 2017; 8(1):1324. Epub 2017/11/08. doi: 10.1038/s41467-017-00965-y. PubMed PMID: 29109393; PMCID: PMC5673918) was used to estimate the TF and generate genome-wide copy number alteration (CNA profiles) (FIGS. 20, and 23). TuFEst (github.com/getzlab/TuFEst) which uses somatic differences in the ctDNA fragment length distribution as well as the tumor-specific CNA profile to estimate MTB (FIG. 23), was also used to determine molecular tumor burden. Deep sequencing coverage data obtained using the targeted sequencing pane was used to detect mutations, CNAs, and SVs (FIG. 23). For each category of genetic alterations, multiple algorithms were applied in a consensus approach to optimize detection sensitivity (FIG. 23). A copy number alteration (CNA) algorithm (github.com/getzlab/Chute) that combined information from the LP WGS with Targeted Panel coverage and observed germline het-site allele fraction shifts was used to identify arm-level CNAs and focal CNAs (FIG. 23). The pipeline was run in Terra, the Broad Institute's established workflow manager, allowing for secure, scalable, and reproducible analysis and collaboration.

[0323] For the estimate of Molecular Tumor Burden (MTB), independent estimates of tumor fraction (TF) were combined, weighted by their confidence. TF estimates were derived from mutation variant allele frequencies (VAFs), CNA profile (using Chute), and low pass (LP) data (iChor and TuFEst) (FIG. 23). The combination of multiple data types and modes of detection provided a molecular tumor burden (MTB) estimate more robust than previous measures of tumor involvement.

[0324] Determining molecular tumor burden (MTB) involved three calculations:
[0325] A) For each cfDNA sample, independent estimates of tumor fraction (TF) were obtained: a) using low-pass whole-genome sequencing copy number alterations (LP WGS CNAs) and fragment length, b) using CNVs from targeted sequencing panel data, and c) using mutation variant allele fractions (VAFs). The three estimates were combined as a weighted sum, where each tumor fraction estimate was multiplied by a weighting value that was inversely proportional to the variance of the method by which the tumor fraction estimate was calculated
[0326] B) Converting the sample tumor fraction to DNA tumor fraction (DTF), where DTF=(TF*ploidy)/(TF*ploidy+2[1-TF]). This step required an estimate of tumor ploidy. In cases in which the ploidy was not known, a representative ploidy value for tumor cells (e.g. cHL median 3.1) was used (Wienand K, et al. Genomic analyses of flow-sorted Hodgkin Reed-Sternberg cells reveal complementary mechanisms of immune evasion. Blood Adv. 2019; 3(23):4065-80. Epub 2019/12/10. doi: 10.1182/bloodadvances.2019001012. PubMed PMID: 31816062; PMCID: PMC6963251).
[0327] C) Converting DNA tumor fraction (DTF) to units of Human Genome Equivalents (HE or HgE): #HGE/ml˜(DTF*mDNA)/(mHG*vTube), where mDNA is the mass of DNA from sequencing library preparation, mHG is the mass of a human genome (˜6.5e-3 ng), and vTube is the volume of blood collected.

### Example 5: Analyses of Primary Tumor Specimens and Cell Lines

[0328] The performance of the targeted sequencing panel was tested on previously characterized cHL and PMBL cell lines with previously-published genetic signatures (FIGS. 2A-2C) (Wienand K, et al. Genomic analyses of flow-sorted Hodgkin Reed-Stemberg cells reveal complementary mechanisms of immune evasion. Blood Adv. 2019; 3(23):4065-80. Epub 2019/12/10. doi: 10.1182/bloodadvances.2019001012. PubMed PMID: 31816062; PMCID: PMC6963251; Chapuy B, et al. Genomic analyses of PMBL reveal new drivers and mechanisms of sensitivity to PD-1 blockade. Blood. 2019; 134(26):2369-82. Epub 2019/11/08. doi: 10.1182/blood.2019002067. PubMed PMID: 31697821; PMCID: PMC6933293). All cell lines had sufficient sequencing depth (>1 million total reads at the requested 100× coverage) to enrich for the targeted genomic sequences using standard Picard metrics (FIGS. 6A and 23). The mean individual probe and target regions and all individual classes of targets (genes, copy-number SNPs, SVs, MSI, TMB and EBV) were covered at the sequencing depth (FIGS. 6B and 7-12). Moreover, the targeted sequencing panel accurately identified the recurrent genetic alterations and EBV status in the cHL and PMBL cell lines (FIGS. 13-15). The concordance confirmed the capacity of the targeted panel to detect known alterations in cHL and PMBL cancer genes. Further, the data demonstrated how well the targeted sequencing panel captures recurrent alterations from specimens with “gold standard” whole-exome sequencing data for these abnormalities (FIG. 14).

### Example 6: Evaluation of the Targeted Sequencing Panel

[0329] As described above in Example 3, the panel was designed to detect and evaluate sequence alterations in key genomic regions (‘targets’), which are relevant for diagnostics and monitoring of classical Hodgkin Lymphoma (cHL) and/or Primary Mediastinal B-cell Lymphoma (PMBL) (FIG. 4). The panel comprised several classes of the target regions, including:
[0330] (i) Exons of the cancer candidate genes (CCG);
[0331] (ii) Genomic loci involved in focal copy-number alterations (CNA);
[0332] (iii) Loci known involved in structural variations (SV) of the genome (gene fusions, translocations, etc);
[0333] (iv) Specific genomic loci to be used for assessment of Tumor Mutational Burden (TMB);
[0334] (v) Genomic loci associated with microsatellite instability (MSI);
[0335] (vi) A pre-selected set of genomic single-nucleotide polymorphisms (SNPs) to be used for sample tracking (‘fingerprinting’) and ancestry analysis; and
[0336] (vii) Selected target regions from the Epstein-Barr virus (EBV) genome, to be used for evaluation of the virus in the analyzed samples.

[0337] Inclusion of the individual targets was prioritized by the frequency of the occurrence of the genetic variations in these regions in the patient population, and by their prognostic and predictive value in the corresponding disease. Total panel size of HL/PMBLV2 was less than 300 Kb, which enabled its compatibility with both liquid biopsy and tissue-based samples. Exemplary cHL/PMBL TWIST panels were redesigned with reductions of focal copy number alteration (CNA) targets and redesigned SNPs to improve on-target reads. Exemplary changes targeted by the targeted sequencing panel also included the removal of arm-level CNAs and inclusion of specific structural variants (“SV”) CIITA, PD Ligands (PDL1, PDL2), and ETV6.

[0338] The panel probes (or baits) were generated by TWIST Biosciences, and were optimized for two panel configurations: with and without EBV probes. As described below, panel performance was evaluated using 8 cHL and PMBL cell lines that had been genetically profiled previously (FIG. 5) (Chapuy et al Blood 2019, Wienand et al Blood Advances 2019). Specifically, target region coverage, presence of off-target reads, as well as ability of the panel to identify known sequence variants and EBV infection were evaluated as follows:

### Target Coverage Analysis

[0339] Picard CollectHsMetrics (v2.23.4) were used to collect the overall coverage metrics and the coverage per target of the cHL/PMBL targeted regions (FIG. 6A). Boxplots of the mean coverage per-target per-sample were created using R (r-project.org) (FIGS. 7-12).

### Evaluation of EBV Detection

[0340] The analysis-ready BAM files (aligned to HG19) were reverted to fastq files and aligned to the EBV (NC_007605) genome using BWA-MEM (v0.7.17). Both the HG19 and EBV aligned genomes were used in running the ngs-disambiguate (v1.0) package to identify the reads that aligned preferably to one genome or the other. The resulting output indicated the number of unique read pairs in the samples that align best to EBV.

### Evaluation of CNA Detection

[0341] A copy neutral (log 2=0.0), reference file was created using CNVkit (v0.9.7). All of the samples were analyzed in one batch against the flat reference to produce log 2 copy ratios for each target. The per-target per-sample copy ratios were visualized in the IGV browser along with segmentation profiles corresponding to whole exome sequencing data previously generated for the same tumor cell lines for comparison and evaluation.

[0342] The performance of the bait set was evaluated for the 7 Lymphoma cell lines which had sufficient sequencing depth (total reads>1 million) for the ability to enrich for genomic sequences within the panel design using standard metrics for targeted sequencing (Picard) (FIGS. 6A and 6B). The coverage metrics indicated that sufficient depth at individual baits/probes (mean bait coverage) and the target (mean target regions) regions were both achieved to at least 100× for all samples (FIGS. 6A, 6B, and 7). This conclusion was further corroborated by the coverage analysis of the individual classes of targets (genes, copy-number SNPs and structural variants (FIGS. 8-10) and microsatellite instability (MSI) (FIG. 11) and tumor mutation burden (TMB) (FIG. 12), with the majority of targets covered at the desired 100× level. The bait set was evaluated for the ability to efficiently capture the targeted regions and non-targeted regions of the genome by determining the percent selected bases which is the ratio of sequences on-target vs non-target (data not shown). The percent selected bases was >80% for all samples which met the expected value for a targeted sequencing panel.

[0343] The ability to detect Epstein Barr virus (EBV) infections using targeted sequencing was achieved by including baits that detect 2 genes in 6 known strains of EBV that infect human B cells. Enrichment of EBV reads was determined by aligning the sequencing reads from the lymphoma cell lines to the EBV genome (NC-0070605) (example, FIGS. 13 and 15). EBV+PMBL cell line (Farage) were analyzed with the bait sets that either included the EBV baits (bottom, FIG. 15) or lacked the EBV baits (top, FIG. 15). As indicated, the EBV reads were only detected with the bait set that included the EBV baits (bottom, FIG. 15). EBV reads were not detected in the other lymphoma cell lines that were known to be EBV−. For the analysis of EBV infection, a methodology was developed for the analysis of contamination of sequencing data with DNA from another species genome (ngs-disambiguate) which counted unique viral (EBV) read pairs in the EBV-positive Farage cell line. In line with previous studies, this analysis correctly identified presence of the EBV reads in Farage cell line and absence of such reads in all other samples, providing an experimental validation for this feature of the panel (FIGS. 13 and 15; notice the sequenced read build-up for the Farage cell line at the EBV genomic loci included in the panel). These data confirmed the ability of the panel that includes viral baited regions to correctly distinguish EBV-positive tumor samples (Farage) from EBV-negative samples (the other cell lines).

[0344] The ability of the panel to detect focal CNAs at specific segments of chromosomes (1p36.32, 2p15, 6p21, 6q23.3, 9p24.1, 15q15.3), previously found to be amplified or deleted in Hodgkin and PMBL patients (FIG. 16), was evaluated. To this end, the copy ratios were computed for each CNA probe included in the panel, and then compared with the corresponding values previously identified for the analyzed samples (FIGS. 16-18). There was good correspondence of the gain of copy number and loss of copy number between two genome browser tracks that showed previously identified and current copy-number ratios for each sample. The panel design was able to detect the increase or decrease of chromosomal copy number within the baited regions (FIGS. 16-18). The design did not assume identification of the exact boundaries of the individual CNA events beyond the baited regions, but focuses on overall event detection. All of the expected gains and losses were observed for each of the baited focal CNAs observed in classical Hodgkin's lymphoma (cHL) and PMBL.

[0345] Structural variants occur that lead to fusion of 2 distinct chromosomal segments separated by large distance and often on different chromosomes. They are detected by panel sequencing that baits the regions across the established breakpoints in tumor samples. The observance of split-reads indicates regions where the chromosome break has occurred, and the sequence reads map to two different chromosomal locations. Four structural variant events in the profiled cell lines (CIITA, ETV6, 9p24.1 (PD-L1 (alternatively referred to as CD274) and PD-L2 (alternatively referred to as PDCD1LG2)) were included in the panel design. The detection of these structural variations (SVs) was evaluated using the generated data in the integrated genome browser (IGV) at each individual SV region breakpoint. All four interrogated SV events showed clear split-read evidence in the samples where they were expected to occur. In an example, the IGV view for a translocation between NUBP1 and CIITA (FIG. 19), both on chromosome 16, shows the sequence reads from the cHL/PMBL TWIST panel on the top (FIG. 19). For comparison, the sequence reads from the same sample previously analyzed by conventional baited sequencing (CCGD) is shown on the bottom (FIG. 19). The same breakpoint and split reads were detected with both approaches (FIG. 19). Additionally, the percent of reads with the variant allele frequency were similar to the previously observed ˜40% (VAF) (FIG. 19). Thus, the cHL/PMBL panel was able to detect recurrent structural variants observed in the cHL and PMBL cell lines.

[0346] The targeted sequencing panel was compatible with, and may be used for the analysis of, liquid biopsy samples (e.g., circulating tumor DNA, or ctDNA, analysis). These samples were typically analyzed with Ultra-Low-Pass Whole Genome Sequencing (ULP-WGS) before being submitted for panel enrichment and deep sequencing. ULP-WGS data were generated for a series of cHL patient samples and analyzed with ichorCNA computational tool (example in FIG. 21). Exemplary methods for ultra low pass sequencing are provided in U.S. Patent Application Publication No. 20190078232, the disclosure of which is incorporated by reference in its entirety for all purposes. IchorCNA allowed estimation of ctDNA fraction in a sample as well as detection of relatively large-scale (usually >2 Mb) CNA events (FIG. 21). Plasma was obtained from the series of cHL patients. IchorCNA was used to estimate the fraction of tumor in cell-free DNA from ultra-low-pass whole genome sequencing (ULP-WGS, 0.1× coverage). IchorCNA uses a probabilistic model, implemented as a hidden Markov model (HMM), and includes segmenting the genome (1 Mb), predicting large-scale copy number alterations, and estimating the tumor fraction of an ultra-low-pass whole genome sequencing sample (ULP-WGS). Aligned reads were counted based on overlap within each bin. Centromeres were filtered out and reads were normalized to correct for GC-content and mapability. IchorCNA was optimized for low coverage (˜0.1×) sequencing of samples and was benchmarked using patient and healthy donor cfDNA samples. Uses of ichorCNA include: (1) informing the presence or absence of tumor-derived DNA and guiding the decision to perform targeted, whole exome or deeper whole genome sequencing; (2) using tumor fraction to calibrate the desired depth of sequencing to reach statistical power for identifying mutations in cell-free DNA; and (3) detecting large-scale copy number alterations from large cohorts by taking advantage of the cost-effective approach of ultra-low-pass sequencing (FIG. 20).

[0347] These ichorCNA results informed the decision on feasibility of further analysis of a given sample based on the tumor fraction in the ctDNA. A comparison of 2535 previously analyzed samples revealed how tumor fraction varied by cohort. Samples with greater than 10% ctDNA could be assayed with whole genome sequencing. Only about 17% of samples were in this category. On the other hand, samples with less than 10% ctDNA could be assayed with deeper using the targeted sequencing panels. About 83% of samples were in this category.

[0348] The pre-treatment plasma samples from cHL patients, analyzed here, exhibited characteristic features of the disease, including amplifications at 2p and 9p chromosomal arms (FIG. 21). Of interest, the CNA events detected for one of the patients in the pre-treatment sample (17561_0033) were absent in the on-treatment sample obtained from the same patient, providing evidence of the treatment efficiency (FIG. 21, bottom panel).

### Example 7: Circulating Tumor (ctDNA) Analyses Using Samples from Patients with Relapsed Classical Hodgkin's Lymphoma (cHL)

[0349] Experiments were undertaken to evaluate the performance of the targeted sequencing panel on serial ctDNA samples from patients with relapsed cHL who were treated with a response-adjusted salvage regimen (N/ICE, NCT03016871) including single-agent nivolumab (N) induction followed by N alone (complete responders [CRs] and partial responders [PRs]) or N and ICE combination chemotherapy (stable disease [SD] and progressive disease [PD]); all patients who achieved CRs or PRs received subsequent high-dose therapy and autologous stem cell transplant (trial schema in FIG. 22). Serial plasma samples (˜3 ml baseline and on-treatment) from N/ICE trial patients were used to construct sequencing libraries and perform deep targeted sequencing (25,000× coverage) using established protocols. Paired normal gDNA samples from each patient were also sequenced with the same targeted assay (10,000× coverage) (Adalsteinsson V A, et al. Scalable whole-exome sequencing of cell-free DNA reveals high concordance with metastatic tumors. Nature communications. 2017; 8(1):1324. Epub 2017/11/08. doi: 10.1038/s41467-017-00965-y. PubMed PMID: 29109393; PMCID: PMC5673918; Parsons H A, et al. Sensitive Detection of Minimal Residual Disease in Patients Treated for Early-Stage Breast Cancer. Clin Cancer Res. 2020; 26(11):2556-64. Epub 2020/03/15. doi: 10.1158/1078-0432.CCR-19-3005. PubMed PMID: 32170028; PMCID: PMC7654718); cfDNA samples from a series of healthy donors were similarly analyzed.

[0350] Serial cell free DNA (cfDNA) samples from N/ICE trial patients (and controls) also underwent low-pass whole-genome sequencing (LP WGS) and iChorCNA analysis to estimate ctDNA (circulating tumor DNA) fraction and detect large-scale (e.g., >2 Mb) copy number alterations (CNAs) (FIGS. 23 and 20). Baseline plasma samples with ≥5 ng of total cfDNA and tumor fractions≥3% were most likely to yield informative data. Therefore, the ctDNA computational pipeline and associated MTB metric were optimized using serial plasma samples from N/ICE trial patients with ≥3% tumor fractions at baseline (W1D1).

[0351] In this series, including the representative patients shown in FIG. 24A, the variants detected aligned with previously characterized molecular signature of cHL, including SVs in CD274, PDCD1LG2 (PD-L2), CHTA, and SOCS1, and CNAs in 9p24.1 (PD-1 ligands (PD-L1 and PD-L2)), 2p15 XPO1, and 6q23 (TNFAIP3). The CoMut plot also demonstrates the ability to comprehensively detect SNVs at baseline, track them over time, and detect new variants in downstream samples (e.g. ETV6 in 017_W3D1). Notably, patient 017, who had the lowest mutational burden at baseline also had the highest molecular tumor burden (MTB). This highlights the importance of capturing the additional categories of genetic alterations, such as CNAs, in the assessment of molecular tumor burden (MTB). In this test series, baseline MTB was calculated and changes in MTB over treatment were plotted on a log scale (representative patients in FIG. 24B).

### Other Embodiments

[0352] From the foregoing description, it will be apparent that variations and modifications may be made to the invention described herein to adopt it to various usages and conditions. Such embodiments are also within the scope of the following claims.

[0353] The recitation of a listing of elements in any definition of a variable herein includes definitions of that variable as any single element or combination (or subcombination) of listed elements. The recitation of an embodiment or an aspect herein includes that embodiment or aspect as any single embodiment or in combination with any other embodiments or portions thereof.

[0354] All patents and publications mentioned in this specification are herein incorporated by reference to the same extent as if each independent patent and publication was specifically and individually indicated to be incorporated by reference. The present disclosure may be related to U.S. Provisional Application No. 63/313,663, filed Feb. 24, 2022, and titled “Improved Methods for Neoplasia Detection from Cell Free DNA,” the disclosure of which is incorporated herein by reference in its entirety for all purposes.

The application's sequence listing, which the Patent Office published only in electronic form, follows.

SEQUENCE LISTING (1502 sequences)

SEQ ID NO: 1 - DNA, 121 bp, synthetic construct
  misc_feature 1..121: note = Description of artificial sequence: synthetic polynucleotide sequence
  source 1..121: mol_type = other DNA
tgatctccagctggatctcccggtcacgcagcttgcgccagtggctgtagtacaaggtcaggggtgtcccctcttcccgggtcagcttctcccaggcttcctggggggttgggggagttca

SEQ ID NO: 2 - DNA, 121 bp, synthetic construct
  misc_feature 1..121: note = Description of artificial sequence: synthetic polynucleotide sequence
  source 1..121: mol_type = other DNA
ggttctgggccaggcttcagtgggctggacagtgatgggcctggccggggggccctgggtctcctggggctgcgtggctggggggtccctgtcctcacagattgcgtccgagctattgctg

SEQ ID NO: 3 - DNA, 121 bp, synthetic construct
  misc_feature 1..121: note = Description of artificial sequence: synthetic polynucleotide sequence
  source 1..121: mol_type = other DNA
cggtgacgcgattccgcagccagagctgcgcggtgaggaagaccatggcgcctgcaggccggcgtcccgaacactcaacaacgcacgcgcagcgccgctgccatcttgcccgggtcggaaa

SEQ ID NO: 4 - DNA, 121 bp, synthetic construct
  misc_feature 1..121: note = Description of artificial sequence: synthetic polynucleotide sequence
  source 1..121: mol_type = other DNA
ggcatctcccctcggccacagggttggaagcccagcgaggctagaggccagtcccaaagtttccaggcatcagggctgcagcccaggagcctcaaggcggcccggcgggcgactggacggc

SEQ ID NO: 5 - DNA, 121 bp, synthetic construct
  misc_feature 1..121: note = Description of artificial sequence: synthetic polynucleotide sequence
  source 1..121: mol_type = other DNA
cacctggtactgcatggcctgcttcccgacatccatgtccaggcctgcagcctgcgagccgttctcacccagcccattgtgcacggccgtcttcttcccccggagctccttcaccaccctg

SEQ ID NO: 6 - DNA, 121 bp, synthetic construct
  misc_feature 1..121: note = Description of artificial sequence: synthetic polynucleotide sequence
  source 1..121: mol_type = other DNA
ctgcatgtccgcctgggaggactccgtgccctctagctgctgctcagagaagctggtggcggctttgtcatacaagcttttatcttcgtaggtcaggagactgctctagagaggagaatca

SEQ ID NO: 7 - DNA, 121 bp, synthetic construct
  misc_feature 1..121: note = Description of artificial sequence: synthetic polynucleotide sequence
  source 1..121: mol_type = other DNA
tgcgcagggccgcggcaccctccacagacggctgctgctccaccctgggggccctgcagggatcaggtgccgggcgctggggcagggacctggcgggggattccaggtgccctcctgcccc

SEQ ID NO: 8 - DNA, 121 bp, synthetic construct
  misc_feature 1..121: note = Description of artificial sequence: synthetic polynucleotide sequence
  source 1..121: mol_type = other DNA
gaattccgccccttcattcgaaggctcccagagtttaaattttggtgagctaattcttcacggtatttgaagagaattgtgctcaagggtggctgagactgagactacactgatttttgtt

SEQ ID NO: 9 - DNA, 121 bp, synthetic construct
  misc_feature 1..121: note = Description of artificial sequence: synthetic polynucleotide sequence
  source 1..121: mol_type = other DNA
ccgagctgccggtctgagcctgaggcatggagcctcctggagactgggggcctcctccctggagatccacccccaaaaccgacgtcttgaggctggtgagcccccgagcctcctctccgtc

SEQ ID NO: 10 - DNA, 121 bp, synthetic construct
  misc_feature 1..121: note = Description of artificial sequence: synthetic polynucleotide sequence
  source 1..121: mol_type = other DNA
ccttaggtgctgtatctcaccttcctgggagccccctgctacgccccagctctgccgtcctgcaaggaggacgagtacccagtgggctccgagtgctgccccaagtgcagtccaggtaggt

SEQ ID NO: 11 - DNA, 121 bp, synthetic construct
  misc_feature 1..121: note = Description of artificial sequence: synthetic polynucleotide sequence
  source 1..121: mol_type = other DNA
tatcgtgtgaaggaggcctgcggggagctgacgggcacagtgtgtgaaccctgccctccaggcacctacattgcccacctcaatggcctaagcaagtgtctgcagtgccaaatgtgtgacc

SEQ ID NO: 12 - DNA, 157 bp, synthetic construct
  misc_feature 1..157: note = Description of artificial sequence: synthetic polynucleotide sequence
  source 1..157: mol_type = other DNA
gccatgggcctgcgcgcgagccggaactgctccaggacagagaacgccgtgtgtggctgcagcccaggccacttctgcatcgtccaggacggggaccactgcgccgcgtgccgcgcttacgccacctccagcccgggccagagggtgcagaagggag

SEQ ID NO: 13 - DNA, 121 bp, synthetic construct
  misc_feature 1..121: note = Description of artificial sequence: synthetic polynucleotide sequence
  source 1..121: mol_type = other DNA
tccctctcttctcaggcaccgagagtcaggacaccctgtgtcagaactgccccccggggaccttctctcccaatgggaccctggaggaatgtcagcaccagaccaagtaagtgaacccggg

SEQ ID NO: 14 - DNA, 144 bp, synthetic construct
  misc_feature 1..144: note = Description of artificial sequence: synthetic polynucleotide sequence
  source 1..144: mol_type = other DNA
ggtgcagctggctggtgacgaaggccggagctgggaccagcagctcccactgggtatggtggtttctctcagggagcctcgtcatcgtcattgtttgctccacagttggcctaatcatatgtgtgaaaagaagaaagccaaggg

SEQ ID NO: 15 - DNA, 121 bp, synthetic construct
  misc_feature 1..121: note = Description of artificial sequence: synthetic polynucleotide sequence
  source 1..121: mol_type = other DNA
gatcagacactgcccctccctgacctgtgtgtctgtgtattgcaggtgatgtagtcaaggtgatcgtctccgtccaggtattgatcctcctccccctctccctcccccctccaccttccca

SEQ ID NO: 16 - DNA, 121 bp, synthetic construct
  misc_feature 1..121: note = Description of artificial sequence: synthetic polynucleotide sequence
  source 1..121: mol_type = other DNA
gaaaagacaggaggcagaaggtgaggccacagtcattgaggccctgcaggcccctccggacgtcaccacggtggccgtggaggagacaataccctcattcacggggaggagcccaaaccac

SEQ ID NO: 17 - DNA, 121 bp, synthetic construct
  misc_feature 1..121: note = Description of artificial sequence: synthetic polynucleotide sequence
  source 1..121: mol_type = other DNA
ctgcccgctccccacccgccccggcccccttaccttggccagctgtgtctccagctccagcacctgcaccatgtcctcctgcaccaggcagctgtccctgggcaggtttgcatcctcccgc

SEQ ID NO: 18 - DNA, 121 bp, synthetic construct
  misc_feature 1..121: note = Description of artificial sequence: synthetic polynucleotide sequence
  source 1..121: mol_type = other DNA
taatcacgcagaaaaataacacagcgaaatgacttttcaaaatgccattggtataattatcgtcttgcccattacactaaatgccgccatttatatctgtgatacttaagtatgcaaacag

SEQ ID NO: 19 - DNA, 121 bp, synthetic construct
  misc_feature 1..121: note = Description of artificial sequence: synthetic polynucleotide sequence
  source 1..121: mol_type = other DNA
gggctggtctttattttgatgaggctgagaagggaaggctgcgggcatgtttaatccgcacgctttagactccccggctgtgatttttgacaatggctcggggttctgcaaagcgggcctg

SEQ ID NO: 20 - DNA, 121 bp, synthetic construct
  misc_feature 1..121: note = Description of artificial sequence: synthetic polynucleotide sequence
  source 1..121: mol_type = other DNA
gcagactccagcacacagggcacctctgactcccgcttcgctttcctcccagcagatctccgaagacctgggcagtgagaagttctgcgtggatgcaaatcaggcgggggctggcagctgg

SEQ ID NO: 21 - DNA, 121 bp, synthetic construct
  misc_feature 1..121: note = Description of artificial sequence: synthetic polynucleotide sequence
  source 1..121: mol_type = other DNA
gagccagtgcgcaccgatgcaggtcctctgatctgtgtccagctcgtagccgcggggacatgtgcacaggggcccagcactggtgtggctgcagccatgggagcagccgccgttgttggcc

SEQ ID NO: 22 - DNA, 121 bp, synthetic construct
  misc_feature 1..121: note = Description of artificial sequence: synthetic polynucleotide sequence
  source 1..121: mol_type = other DNA
ggcgcctaccatgctgtacgtcggtgaccccgcacggcacctcgccacggtaggtgtgacgcgccattcataggatctcttcggggactttgcgggggattttgctgcagtgtagggttca

SEQ ID NO: 23 - DNA, 121 bp, synthetic construct
  misc_feature 1..121: note = Description of artificial sequence: synthetic polynucleotide sequence
  source 1..121: mol_type = other DNA
tctcaaaatgttcgtgaccacccgagtggcaataaggatgtaacttacaaaattggcagcatccatgattccatcttctacagggtgggtgcaatcaagagtgaacttcagaacttgcttc

SEQ ID NO: 24 - DNA, 121 bp, synthetic construct
  misc_feature 1..121: note = Description of artificial sequence: synthetic polynucleotide sequence
  source 1..121: mol_type = other DNA
tgccccccttcaccacaagctttttctaagaaaatacacaaatgataacagagatgaagtttcagtcagtcggaaaaacaagattaacagaaccagaaacgtcataggtataaaagtccat

SEQ ID NO: 25 - DNA, 121 bp, synthetic construct
  misc_feature 1..121: note = Description of artificial sequence: synthetic polynucleotide sequence
  source 1..121: mol_type = other DNA
gccaggccacctcacgtccggccccggggatgcgcgtcctcctcgccgcgctgggactgctgttcctgggggcgctacgagccttcccacaggtaagcgggtgacgggcgcctggggaggt

SEQ ID NO: 26 - DNA, 121 bp, synthetic construct
  misc_feature 1..121: note = Description of artificial sequence: synthetic polynucleotide sequence
  source 1..121: mol_type = other DNA
cttttctgacctgccaggatcgacccttcgaggacacctgtcatggaaaccccagccactactatgacaaggctgtcaggaggtgctgttaccgctgccccatgggtgagtgggggcgttg

SEQ ID NO: 27 - DNA, 121 bp, synthetic construct
  misc_feature 1..121: note = Description of artificial sequence: synthetic polynucleotide sequence
  source 1..121: mol_type = other DNA
agggctgttcccgacacagcagtgcccacagaggcctactgactgcaggaagcagtgtgagcctgactactacctggatgaggccgaccgctgtacagcctgcgtgacttgttctcgaggt

SEQ ID NO: 28 - DNA, 154 bp, synthetic construct
  misc_feature 1..154: note = Description of artificial sequence: synthetic polynucleotide sequence
  source 1..154: mol_type = other DNA
gacgacctcgtggagaagacgccgtgtgcatggaactcctcccgtgtctgcgaatgtcgacccggcatgttctgttccacgtctgccgtcaactcctgtgcccgctgcttcttccattctgtctgtccggcagggatgattgtcaagttcccag

SEQ ID NO: 29 - DNA, 121 bp, synthetic construct
  misc_feature 1..121: note = Description of artificial sequence: synthetic polynucleotide sequence
  source 1..121: mol_type = other DNA
ctgtcccccctgcaggcacggcgcagaagaacacggtctgtgagccggcttccccaggggtcagccctgcctgtgccagcccagagaactgcaaggaaccctccaggtgactccctggctt

SEQ ID NO: 30 - DNA, 165 bp, synthetic construct
  misc_feature 1..165: note = Description of artificial sequence: synthetic polynucleotide sequence
  source 1..165: mol_type = other DNA
gtggcaccatcccccaggccaagcccaccccggtgtccccagcaacctccagtgccagcaccatgcctgtaagagggggcacccgcctcgcccaggaagctgcttctaaactgacgagggctcccgactctccctcctctgtgggaaggcctagttcagatccag

SEQ ID NO: 31 - DNA, 121 bp, synthetic construct
  misc_feature 1..121: note = Description of artificial sequence: synthetic polynucleotide sequence
  source 1..121: mol_type = other DNA
aggtctgtccccaacacagccatgcccagaggggtctggtgattgcagaaagcagtgtgagcccgactactacctggacgaggccggccgctgcacggcctgcgtgagctgttctcgaggt

SEQ ID NO: 32 - DNA, 154 bp, synthetic construct
  misc_feature 1..154: note = Description of artificial sequence: synthetic polynucleotide sequence
  source 1..154: mol_type = other DNA
gatgaccttgtggagaagacgccatgtgcatggaactcctcccgcacctgcgaatgtcgacctggcatgatctgtgccacatcagccaccaactcccgtgcccgctgtgtcccctacccaatctgtgcagcagagacggtcaccaagccccagg

SEQ ID NO: 33 - DNA, 121 bp, synthetic construct
  misc_feature 1..121: note = Description of artificial sequence: synthetic polynucleotide sequence
  source 1..121: mol_type = other DNA
cgtcccctctgcagatatggctgagaaggacaccacctttgaggcgccacccctggggacccagccggactgcaaccccaccccagagaatggcgaggcgcctgccaggtgactcccccac

SEQ ID NO: 34 - DNA, 121 bp, synthetic construct
  misc_feature 1..121: note = Description of artificial sequence: synthetic polynucleotide sequence
  source 1..121: mol_type = other DNA
gcagcaccagccccactcagagcttgctggtggactcccaggccagtaagacgctgcccatcccaaccagcgctcccgtcgctctctcctccacggggaagcccgttctggatgcaggtaa

SEQ ID NO: 35 - DNA, 121 bp, synthetic construct
  misc_feature 1..121: note = Description of artificial sequence: synthetic polynucleotide sequence
  source 1..121: mol_type = other DNA
tgtgttccagggccagtgctcttctgggtgatcctggtgttggttgtggtggtcggctccagcgccttcctcctgtgccaccggagggcctgcaggaagcgaattcggcagagtaagtggc

SEQ ID NO: 36 - DNA, 121 bp, synthetic construct
  misc_feature 1..121: note = Description of artificial sequence: synthetic polynucleotide sequence
  source 1..121: mol_type = other DNA
gccacccccagccttcctcctggtgtcgtttcagagctccacctgtgctacccggtccagacctcccagcccaagctagagcttgtgggtgagtgtccagccgtccaaaggggctgcccga

SEQ ID NO: 37 - DNA, 121 bp, synthetic construct
  misc_feature 1..121: note = Description of artificial sequence: synthetic polynucleotide sequence
  source 1..121: mol_type = other DNA
gggggctgccagactccttggtgaagttgctgctcttgctttttgcagattccagacccaggaggagctcaacggtaagtacccctcccttgcccccacctcagcttcgtgcccctaaatc

SEQ ID NO: 38 - DNA, 209 bp, synthetic construct
  misc_feature 1..209: note = Description of artificial sequence: synthetic polynucleotide sequence
  source 1..209: mol_type = other DNA
gcagctgaggagtggtgcgtcggtgacagaacccgtcgcggaagagcgagggttaatgagccagccactgatggagacctgccacagcgtgggggcagcctacctggagagcctgccgctgcaggatgccagcccggccgggggcccctcgtcccccagggaccttcctgagccccgggtgtccacggagcacaccaataacaagattg

SEQ ID NO: 39 - DNA, 121 bp, synthetic construct
  misc_feature 1..121: note = Description of artificial sequence: synthetic polynucleotide sequence
  source 1..121: mol_type = other DNA
gagaaaatctacatcatgaaggctgacaccgtgatcgtggggaccgtgaaggctgagctgccggagggccggggcctggcggggccagcagagcccgagttggaggaggagctggaggcgg

SEQ ID NO: 40 - DNA, 121 bp, synthetic construct
  misc_feature 1..121: note = Description of artificial sequence: synthetic polynucleotide sequence
  source 1..121: mol_type = other DNA
taccccccactaccccgagcaggagacagaaccgcctctgggcagctgcagcgatgtcatgctctcagtggaagaggaagggaaagaagaccccttgcccacagctgcctctggaaagtga

SEQ ID NO: 41 - DNA, 121 bp, synthetic construct
  misc_feature 1..121: note = Description of artificial sequence: synthetic polynucleotide sequence
  source 1..121: mol_type = other DNA
ggaggatgaattcgagcagccaaccatgtcttttgaatcctacctcagctatgaccagccccggaagaaaaagaaaaagattgtgaaaacttcagccacggcacttggagataaaggactt

SEQ ID NO: 42 - DNA, 121 bp, synthetic construct
  misc_feature 1..121: note = Description of artificial sequence: synthetic polynucleotide sequence
  source 1..121: mol_type = other DNA
atgactctaaaagcactggtaaaaacttggactcagttcagaaattacccaaggtgaacaaaaccaagtcagagaagccggctggagctgatttagccaagctgagaaaggtaaccccttc

SEQ ID NO: 43 - DNA, 339 bp, synthetic construct
  misc_feature 1..339: note = Description of artificial sequence: synthetic polynucleotide sequence
  source 1..339: mol_type = other DNA
catggccgcgcaggtcgcccccgccgccgccagcagcctgggcaacccgccgccgccgccgccctcggagctgaagaaagccgagcagcagcagcgggaggaggcggggggcgaggcggcggcggcggcagcggccgagcgcggggaaatgaaggcagccgccgggcaggaaagcgagggccccgccgtggggccgccgcagccgctgggaaaggagctgcaggacggggccgagagcaatgggggtggcggcggcggcggagccggcagcggcggcgggcccggcgcggagccggacctgaagaactcgaacgggaacgcgggccctaggcccgccct

SEQ ID NO: 44 - DNA, 451 bp, synthetic construct
  misc_feature 1..451: note = Description of artificial sequence: synthetic polynucleotide sequence
  source 1..451: mol_type = other DNA
gaacaataacctcacggagccgcccggcggcggcggtggcggcagcagcgatggggtgggggcgcctcctcactcagccgcggccgccttgccgcccccagcctacggcttcgggcaaccctacggccggagcccgtctgccgtcgccgccgccgcggccgccgtcttccaccaacaacatggcggacaacaaagccctggcctggcagcgctgcagagcggcggcggcgggggcctggagccctacgcggggccccagcagaactctcacgaccacggcttccccaaccaccagtacaactcctactaccccaaccgcagcgcctaccccccgcccgccccggcctacgcgctgagctccccgagaggtggcactccgggctccggcgcggcggcggctgccggctccaagccgcctccctcctccagcgcctccgcctcctcgtcgtct

SEQ ID NO: 45 - DNA, 348 bp, synthetic construct
  misc_feature 1..348: note = Description of artificial sequence: synthetic polynucleotide sequence
  source 1..348: mol_type = other DNA
tcgtccttcgctcagcagcgcttcggggccatggggggaggcggcccctccgcggccggcgggggaactccccagcccaccgccacccccaccctcaaccaactgctcacgtcgcccagctcggcccggggctaccagggctaccccgggggcgactacagtggcgggccccaggacgggggcgccggcaagggcccggcggacatggcctcgcagtgttggggggctgcggcggcggcagctgcggcggcggccgcctcgggaggggcccaacaaaggagccaccacgcgcccatgagccccgggagcagcggcggcggggggcagccgctcgcccggacccctcag

SEQ ID NO: 46 - DNA, 214 bp, synthetic construct
  misc_feature 1..214: note = Description of artificial sequence: synthetic polynucleotide sequence
  source 1..214: mol_type = other DNA
gccatccagtccaatggatcagatgggcaagatgagacctcagccatatggcgggactaacccatactcgcagcaacagggacctccgtcaggaccgcagcaaggacatgggtacccagggcagccatacgggtcccagaccccgcagcggtacccgatgaccatgcagggccgggcgcagagtgccatgggcggcctctcttatacacagcag

SEQ ID NO: 47 - DNA, 454 bp, synthetic construct
  misc_feature 1..454: note = Description of artificial sequence: synthetic polynucleotide sequence
  source 1..454: mol_type = other DNA
gattcctccttatggacaacaaggccccagcgggtatggtcaacagggccagactccatattacaaccagcaaagtcctcaccctcagcagcagcagccaccctactcccagcaaccaccgtcccagacccctcatgcccaaccttcgtatcagcagcagccacagtctcaaccaccacagctccagtcctctcagcctccatactcccagcagccatcccagcctccacatcagcagtccccggctccatacccctcccagcagtcgacgacacagcagcacccccagagccagcccccctactcacagccacaggctcagtctccttaccagcagcagcaacctcagcagccagcaccctcgacgctctcccagcaggctgcgtatcctcagccccagtctcagcagtcccagcaaactgcctattcccagcagcgcttccctccaccgcag

SEQ ID NO: 48 - DNA, 121 bp, synthetic construct
  misc_feature 1..121: note = Description of artificial sequence: synthetic polynucleotide sequence
  source 1..121: mol_type = other DNA
aggagctatctcaagattcatttgggtctcaggcatcctcagccccctcaatgacctccagtaagggagggcaagaagatatgaacctgagccttcagtcaagaccctccagcttgcctgt

SEQ ID NO: 49 - DNA, 121 bp, synthetic construct
  misc_feature 1..121: note = Description of artificial sequence: synthetic polynucleotide sequence
  source 1..121: mol_type = other DNA
ggatctatctggttcaatagatgacctccccatggggacagaaggagctctgagtcctggagtgagcacatcagggatttccagcagccaaggagagcagagtaatccagctcagtctcct

SEQ ID NO: 50 - DNA, 121 bp, synthetic construct
  misc_feature 1..121: note = Description of artificial sequence: synthetic polynucleotide sequence
  source 1..121: mol_type = other DNA
ttctctcctcatacctcccctcacctgcctggcatccgaggcccttccccgtcccctgttggctctcccgccagtgttgctcagtctcgctcaggaccactctcgcctgctgcagtgccag

SEQ ID NO: 51 - DNA, 121 bp, synthetic construct
  misc_feature 1..121: note = Description of artificial sequence: synthetic polynucleotide sequence
  source 1..121: mol_type = other DNA
tctttgtctggagcaggcaaccagatgccacctcggccacccagtggccagtcggacagcatcatgcatccttccatgaaccaatcaagcattgcccaagatcgaggtgagagcctgggtg

SEQ ID NO: 52 - DNA, 169 bp, synthetic construct
  misc_feature 1..169: note = Description of artificial sequence: synthetic polynucleotide sequence
  source 1..169: mol_type = other DNA
ggttatatgcagaggaacccccagatgccccagtacagttccccccagcccggctcagccttatctccgcgtcagccttccggaggacagatacacacaggcatgggctcctaccagcagaactccatggggagctatggtccccaggggggtcagtatggcccacaag

SEQ ID NO: 53 - DNA, 314 bp, synthetic construct
  misc_feature 1..314: note = Description of artificial sequence: synthetic polynucleotide sequence
  source 1..314: mol_type = other DNA
ggtggctaccccaggcagccaaactataatgccttgcccaatgccaactaccccagtgcaggcatggctggaggcataaaccccatgggtgccggaggtcaaatgcatggacagcctggcatcccaccttatggcacactccctccagggaggatgagtcacgcctccatgggcaaccggccttatggccctaacatggccaatatgccacctcaggttgggtcagggatgtgtcccccaccagggggcatgaaccggaaaacccaagaaactgctgtcgccatgcatgttgctgccaactctatccaaaacag

SEQ ID NO: 54 - DNA, 147 bp, synthetic construct
  misc_feature 1..147: note = Description of artificial sequence: synthetic polynucleotide sequence
  source 1..147: mol_type = other DNA
ggccgccaggctaccccaatatgaatcaagggggcatgatgggaactggacctccttatggacaagggattaatagtatggctggcatgatcaaccctcagggacccccatattccatgggtggaaccatggccaacaattctgcag

SEQ ID NO: 55 - DNA, 121 bp, synthetic construct
  misc_feature 1..121: note = Description of artificial sequence: synthetic polynucleotide sequence
  source 1..121: mol_type = other DNA
ttacagggatggcagccagcccagagatgatgggccttggggatgtaaagttaactccagccaccaaaatgaacaacaaggcagatgggacacccaagacagaatccaaatccaaggtagt

SEQ ID NO: 56 - DNA, 211 bp, synthetic construct
  misc_feature 1..211: note = Description of artificial sequence: synthetic polynucleotide sequence
  source 1..211: mol_type = other DNA
gaaatccagttcttctactacaaccaatgagaagatcaccaagttgtatgagctgggtggtgagcctgagaggaagatgtgggtggaccgttatctggccttcactgaggagaaggccatgggcatgacaaatctgcctgctgtgggtaggaaacctctggacctctatcgcctctatgtgtctgtgaaggagattggtggattgactcag

SEQ ID NO: 57 - DNA, 209 bp, synthetic construct
  misc_feature 1..209: note = Description of artificial sequence: synthetic polynucleotide sequence
  source 1..209: mol_type = other DNA
ggtcaacaagaacaaaaaatggcgggaacttgcaaccaacctcaatgtgggcacatcaagcagtgctgccagctccttgaaaaagcagtatatccagtgtctctatgcctttgaatgcaagattgaacggggagaagaccctcccccagacatctttgcagctgctgattccaagaagtcccagcccaagatccagcctccctctcctg

SEQ ID NO: 58 - DNA, 134 bp, synthetic construct
  misc_feature 1..134: note = Description of artificial sequence: synthetic polynucleotide sequence
  source 1..134: mol_type = other DNA
gcgggatcaggatctatgcaggggccccagactccccagtcaaccagcagttccatggcagaaggaggagacttaaagccaccaactccagcatccacaccacacagtcagatccccccattgccaggcatgag

SEQ ID NO: 59 - DNA, 177 bp, synthetic construct
  misc_feature 1..177: note = Description of artificial sequence: synthetic polynucleotide sequence
  source 1..177: mol_type = other DNA
gcaggagcaattcagttgggatccaggatgcctttaatgatggaagtgactccacattccagaagcggaattccatgactccaaaccctgggtatcagcccagtatgaatacctctgacatgatggggcgcatgtcctatgagccaaataaggatccttatggcagcatgaggaaag

SEQ ID NO: 60 - DNA, 152 bp, synthetic construct
  misc_feature 1..152: note = Description of artificial sequence: synthetic polynucleotide sequence
  source 1..152: mol_type = other DNA
gctccagggagtgatcccttcatgtcctcagggcagggccccaacggcgggatgggtgacccctacagtcgtgctgccggccctgggctaggaaatgtggcgatgggaccacgacagcactatccctatggaggtccttatgacagagtgag

SEQ ID NO: 61 - DNA, 139 bp, synthetic construct
  misc_feature 1..139: note = Description of artificial sequence: synthetic polynucleotide sequence
  source 1..139: mol_type = other DNA
ggacggagcctggaatagggcctgagggaaacatgagcactggggccccacagccgaatctcatgccttccaacccagactcggggatgtattctcctagccgctaccccccgcagcagcagcagcagcagcagcaacg

SEQ ID NO: 62 - DNA, 121 bp, synthetic construct
  misc_feature 1..121: note = Description of artificial sequence: synthetic polynucleotide sequence
  source 1..121: mol_type = other DNA
tgcctcctatagacatgattcctatggcaatcagttctccacccaaggcaccccttctggcagccccttccccagccagcagactacaatgtatcaacagcaacagcaggtgaggagggta

SEQ ID NO: 63 - DNA, 441 bp, synthetic construct
  misc_feature 1..441: note = Description of artificial sequence: synthetic polynucleotide sequence
  source 1..441: mol_type = other DNA
gaattacaagcggccaatggatggcacatatggccctcctgccaagcggcacgaaggggagatgtacagcgtgccatacagcactgggcaggggcagcctcagcagcagcagttgcccccagcccagccccagcctgccagccagcaacaagctgcccagccttcccctcagcaagatgtatacaaccagtatggcaatgcctatcctgccactgccacagctgctactgagcgccgaccagcaggcggcccccagaaccaatttccattccagtttggccgagaccgtgtctctgcaccccctggcaccaatgcccagcaaaacatgccaccacaaatgatgggcggccccatacaggcatcagctgaggttgctcagcaaggcaccatgtggcaggggcgtaatgacatgacctataattatgccaacaggcagagcac

SEQ ID NO: 64 - DNA, 452 bp, synthetic construct
  misc_feature 1..452: note = Description of artificial sequence: synthetic polynucleotide sequence
  source 1..452: mol_type = other DNA
gggctctgccccccagggccccgcctatcatggcgtgaaccgaacagatgaaatgctgcacacagatcagagggccaaccacgaaggctcgtggccttcccatggcacacgccagcccccatatggtccctctgcccctgtgccccccatgacaaggccccctccatctaactaccagcccccaccaagcatgcagaatcacattcctcaggtatccagccctgctcccctgccccggccaatggagaaccgcacctctcctagcaagtctccattcctgcactctgggatgaaaatgcagaaggcaggtcccccagtacctgcctcgcacatagcacctgcccctgtgcagccccccatgattcggcgggatatcaccttcccacctggctctgttgaagccacacagcctgtgttgaagcagaggaggcggctcacaatgaaagacattg

SEQ ID NO: 65 - DNA, 121 bp, synthetic construct
  misc_feature 1..121: note = Description of artificial sequence: synthetic polynucleotide sequence
  source 1..121: mol_type = other DNA
ccggaggcatggcgggtaatgatgtccctcaagtctggtctcctggcagagagcacatgggcattagataccatcaacatcctgctgtatgatgacaacagcatcatgaccttcaacctca

SEQ ID NO: 66 - DNA, 345 bp, synthetic construct
  misc_feature 1..345: note = Description of artificial sequence: synthetic polynucleotide sequence
  source 1..345: mol_type = other DNA
gctcccagggttgctagagctccttgtagaatatttccgacgatgcctgattgagatctttggcattttaaaggagtatgaggtgggtgacccaggacagagaacgctactggatcctgggaggttcagcaaggtgtctagtccagctcccatggagggtggggaagaagaagaagaacttctaggtcctaaactagaagaggaagaagaagaggaagtagttgaaaatgatgaggagatagccttttcaggcaaggacaagccagcttcagagaatagtgaggagaagctgatcagtaagtttgacaagcttccagtaaagatcgtacagaagaatgatccatt

SEQ ID NO: 67 - DNA, 462 bp, synthetic construct
  misc_feature 1..462: note = Description of artificial sequence: synthetic polynucleotide sequence
  source 1..462: mol_type = other DNA
tgtggtggactgctcagataagcttgggcgtgtgcaggagtttgacagtggcctgctgcactggcggattggtgggggggacaccactgagcatatccagacccacttcgagagcaagacagagctgctgccttcccggcctcacgcaccctgcccaccagcccctcggaagcatgtgacaacagcagagggtacaccagggacaacagaccaggaggggcccccacctgatggacctccagaaaaacggatcacagccactatggatgacatgttgtctactcggtctagcaccttgaccgaggatggagctaagagttcagaggccatcaaggagagcagcaagtttccatttggcattagcccagcacagagccaccggaacatcaagatcctagaggacgaaccccacagtaaggatgagaccccactgtgtacccttctggactggcaggattctct

SEQ ID NO: 68 - DNA, 461 bp, synthetic construct
  misc_feature 1..461: note = Description of artificial sequence: synthetic polynucleotide sequence
  source 1..461: mol_type = other DNA
tgccaagcgctgcgtctgtgtgtccaataccattcgaagcctgtcatttgtgccaggcaatgactttgagatgtccaaacacccagggctgctgctcatcctgggcaagctgatcctgctgcaccacaagcacccagaacggaagcaggcaccactaacttatgaaaaggaggaggaacaggaccaaggggtgagctgcaacaaagtggagtggtggtgggactgcttggagatgctccgggaaaacaccttggttacactcgccaacatctcggggcagttggacctatctccataccccgagagcatttgcctgcctgtcctggacggactcctacactgggcagtttgcccttcagctgaagcccaggaccccttttccaccctgggccccaatgccgtcctttccccgcagagactggtcttggaaaccctcagcaaactcagcatccaggacaaca

SEQ ID NO: 69 - DNA, 467 bp, synthetic construct
  misc_feature 1..467: note = Description of artificial sequence: synthetic polynucleotide sequence
  source 1..467: mol_type = other DNA
atgtggacctgattctggccacaccccccttcagccgcctggagaagttgtatagcactatggtgcgcttcctcagtgaccgaaagaacccggtgtgccgggagatggctgtggtactgctggccaacctggctcagggggacagcctggcagctcgtgccattgcagtgcagaagggcagtatcggcaacctcctgggcttcctagaggacagccttgccgccacacagttccagcagagccaggccagcctcctccacatgcagaacccaccctttgagccaactagtgtggacatgatgcggcgggctgcccgcgcgctgcttgccttggccaaggtggacgagaaccactcagagtttactctgtacgaatcacggctgttggacatctcggtatcaccgttgatgaactcattggtttcacaagtcatttgtgatgtactgtttttgattggccagtcatga

SEQ ID NO: 70 - DNA, 121 bp, synthetic construct
  misc_feature 1..121: note = Description of artificial sequence: synthetic polynucleotide sequence
  source 1..121: mol_type = other DNA
ctgggctattccctgcaggtcacctgccagtgaagcttcctgactacaacaaccgtttgagagtgctggttgccacctatgtgaccttcagccccaatggcacagagctactagtcaacat

SEQ ID NO: 71 - DNA, 121 bp, synthetic construct
  misc_feature 1..121: note = Description of artificial sequence: synthetic polynucleotide sequence
  source 1..121: mol_type = other DNA
gaacaggtatgtacagcataaggtggttctgccccatcaccattccatgcccagcagccaggggcatgtaccttatgttcactgctgaggcagacaagacacaacagccttatggtaaatg

SEQ ID NO: 72 - DNA, 121 bp, synthetic construct
  misc_feature 1..121: note = Description of artificial sequence: synthetic polynucleotide sequence
  source 1..121: mol_type = other DNA
ttatttttttcttatttttagagacattttaaatccaaaggatgtgatcagtgcccagtttgaaaacaccaccactagtaaagatttttgcagtcagtcatgtttgtcaacatatgaactg

SEQ ID NO: 73 - DNA, 121 bp, synthetic construct
  misc_feature 1..121: note = Description of artificial sequence: synthetic polynucleotide sequence
  source 1..121: mol_type = other DNA
acctattgttaccataaatacaaatagtatttcaaccaaatgcagcatgtgtcagaagaatgctgttgtaagttaccattttcctttattggggcaggagtctaatacgtttgtgcttaaa

SEQ ID NO: 74 - DNA, 121 bp, synthetic construct
  misc_feature 1..121: note = Description of artificial sequence: synthetic polynucleotide sequence
  source 1..121: mol_type = other DNA
ctctcagatgtggatgtgccatctccagatgaaaagtctgtaatcacttatgtgtcttcgatttatgatgccttccctaaagttcctgagggtggagaagggatcagtgctacggtaaaag

SEQ ID NO: 75 - DNA, 154 bp, synthetic construct
  misc_feature 1..154: note = Description of artificial sequence: synthetic polynucleotide sequence
  source 1..154: mol_type = other DNA
agaatgtatttacccggcaactctgtttagaacatgatgaaaagctagtatcctatctgtctctgttacggaacattgaaatgaggaccaaacagattcaacctttggagctaaacctggcagaactacaggatctgctgtgtcaggccaaggt

SEQ ID NO: 76 - DNA, 154 bp, synthetic construct
  misc_feature 1..154: note = Description of artificial sequence: synthetic polynucleotide sequence
  source 1..154: mol_type = other DNA
agactaaagtgttaaatcagcacacacagctagaaggccgacttcaagatctgagagcctgggttggcaataaaaatcttattctgaacagcaagggatctaacagtgaaatagatgttgacagcctgaacctctgcctccaacagtatgaggt

SEQ ID NO: 77 - DNA, 121 bp, synthetic construct
  misc_feature 1..121: note = Description of artificial sequence: synthetic polynucleotide sequence
  source 1..121: mol_type = other DNA
tggatggcggagggctctgccatcagcagcaagcagcacgggtgtaacttacctctcccaagtcacggatcctctttaggaagcgcttttcaaaatgtgtggggtccacttcagttgctgg

SEQ ID NO: 78 - DNA, 121 bp, synthetic construct
  misc_feature 1..121: note = Description of artificial sequence: synthetic polynucleotide sequence
  source 1..121: mol_type = other DNA
tctgaaacaatatctggatctaacagaagagaaaagaaaacagagtgaaaggcagtcgattgccagggattgccacccaggctcctgtttctccccaagctgggttaaagcagcacatggc

SEQ ID NO: 79 - DNA, 121 bp, synthetic construct
  misc_feature 1..121: note = Description of artificial sequence: synthetic polynucleotide sequence
  source 1..121: mol_type = other DNA
cttcaaatgcagagcattcttcacttttattcattatctctttttaaattttagagctgaacgacaaaggaatgaagcactatataatgccgaagagctgagtaaagctttccaacaatat

SEQ ID NO: 80 - DNA, 121 bp, synthetic construct
  misc_feature 1..121: note = Description of artificial sequence: synthetic polynucleotide sequence
  source 1..121: mol_type = other DNA
agtggctgaaaaactggaaaaggtaaaaggcagttgtgcaaattcagtgttttgtattactgtctatattccaacagtaaaggtaggaataattaaaatatgtttatggttgagacagaga

SEQ ID NO: 81 - DNA, 382 bp, synthetic construct
  misc_feature 1..382: note = Description of artificial sequence: synthetic polynucleotide sequence
  source 1..382: mol_type = other DNA
ctcacttggagctggtgtacttggtgaccgccttggtgccctcggacacggcgtgcttggccagctcgccgggcagcagcaggcgcacggccgtctggatctcgcgggatgtgatggtggagcgcttgttgtagtgcgccaggcgggaagcctctcccgcgatgcgctcgaagatgtcgttgacgaaggagttcatgatgcccatggccttggacgagatgccggtgtcggggtggacctgcttcagcaccttgtacacgtagatggagtagctctctttgcggctgcgcttgcgcttcttgccgtctttcttctgggctttggtgacggctttcttggagccctttttaggggccggagcggattttgccggttcaggcat

SEQ ID NO: 82 - DNA, 261 bp, synthetic construct
  misc_feature 1..261: note = Description of artificial sequence: synthetic polynucleotide sequence
  source 1..261: mol_type = other DNA
catgtcttcccttcctgggtgcattggtttggatgcagcaacagctacagtggagtctgaagagattgcagagctgcaacaggcagtggttgaggaactgggtatctctatggaggaacttcggcatttcatcgatgaggaactggagaagatggattgtgtacagcaacgcaagaagcagctagcagagttagagacatgggtaatacagaaagaatctgaggtggctcacgttgaccaactctttgatgatgcatccag

SEQ ID NO: 83 - DNA, 153 bp, synthetic construct
  misc_feature 1..153: note = Description of artificial sequence: synthetic polynucleotide sequence
  source 1..153: mol_type = other DNA
gggcagtgactaattgtgagtctttggtgaaggacttctactccaagctgggactacaataccgggacagtagctctgaggacgaatcttcccggcctacagaaataattgagattcctgatgaagatgatgatgtcctcagtattgattcag

SEQ ID NO: 84 - DNA, 121 bp, synthetic construct
  misc_feature 1..121: note = Description of artificial sequence: synthetic polynucleotide sequence
  source 1..121: mol_type = other DNA
tgtgtaagtctctgacactcattagagttcttctcgtccataggtgatgctgggagcagaactccaaaagaccagaaggtaagttaggatggtaagggaagggtgagagataagaatatga

SEQ ID NO: 85 - DNA, 121 bp, synthetic construct
  misc_feature 1..121: note = Description of artificial sequence: synthetic polynucleotide sequence
  source 1..121: mol_type = other DNA
cttttctacagctccgtgaagctatggctgccttaagaaagtcagctcaagatgttcagaagttcatggatgctgtcaacaagaagagcagttcccaggatctgcataaaggttagggtca

SEQ ID NO: 86 - DNA, 121 bp, synthetic construct
  misc_feature 1..121: note = Description of artificial sequence: synthetic polynucleotide sequence
  source 1..121: mol_type = other DNA
accttgagtcagatgtctggagaactaagcaaagatggtgacctgatagtcagcatgcgaattctgggcaagaagagaactaagacttggcacaaaggcacccttattgccatccagacag

SEQ ID NO: 87 - DNA, 203 bp, synthetic construct
  misc_feature 1..203: note = Description of artificial sequence: synthetic polynucleotide sequence
  source 1..203: mol_type = other DNA
gggccagggaagaaatacaaggtgaaatttgacaacaaaggaaagagtctactgtcggggaaccatattgcctatgattaccaccctcctgctgacaagctgtatgtgggcagtcgggtggtcgccaaatacaaagatgggaatcaggtctggctctatgctggcattgtagctgagacaccaaacgtcaaaaacaagctcag

SEQ ID NO: 88 - DNA, 121 bp, synthetic construct
  misc_feature 1..121: note = Description of artificial sequence: synthetic polynucleotide sequence
  source 1..121: mol_type = other DNA
tctgctgtcactcttcttttataggtttctcattttctttgatgatggctatgcttcctatgtcacacagtcggaactgtatcccatttgccggccacgtgagtgtttctcccttattcct

SEQ ID NO: 89 - DNA, 121 bp, synthetic construct
  misc_feature 1..121: note = Description of artificial sequence: synthetic polynucleotide sequence
  source 1..121: mol_type = other DNA
gtgaaaaagacttgggaggacatagaagacatctcctgccgtgacttcatagaggagtatgtcactgcctaccccaaccgccccatggtactgctcaagagtggccagcttatcaagactg

SEQ ID NO: 90 - DNA, 121 bp, synthetic construct
  misc_feature 1..121: note = Description of artificial sequence: synthetic polynucleotide sequence
  source 1..121: mol_type = other DNA
ggaaggcacgtggtggaagtcccgagttgaggaggtggatggcagcctagtcaggatcctcttcctggtactgttcttctctacaattttggaggcagaggttggtggggggggaacttaa

SEQ ID NO: 91 - DNA, 121 bp, synthetic construct
  misc_feature 1..121: note = Description of artificial sequence: synthetic polynucleotide sequence
  source 1..121: mol_type = other DNA
gacaaaagatgtgagtggatctatcgaggctctacacggctggagcccatgttcagcatgaaaacatcctcagcctctgcactggagaagaagcaaggacagctcaggacacgtccaaata

SEQ ID NO: 92 - DNA, 158 bp, synthetic construct
  misc_feature 1..158: note = Description of artificial sequence: synthetic polynucleotide sequence
  source 1..158: mol_type = other DNA
ggtgctgtgaggagcaaaggccctgttgtccagtacacacaggatctgaccggtactggaacccagttcaagccagtggaacccccacagcctacagctccacctgccccacctttcccacctgctccacctctatccccccaagcaggtgacagtga

SEQ ID NO: 93 - DNA, 157 bp, synthetic construct
  misc_feature 1..157: note = Description of artificial sequence: synthetic polynucleotide sequence
  source 1..157: mol_type = other DNA
gcttggaaagccagcttgcccagtcacggaagcaggtagccaaaaagagcacgtcctttcgaccaggatctgtgggctctggtcattcctcccctacatctcctgcactcagtgaaaatgtctctggtgggaaacctgggatcaaccagacatatag

SEQ ID NO: 94 - DNA, 308 bp, synthetic construct
  misc_feature 1..308: note = Description of artificial sequence: synthetic polynucleotide sequence
  source 1..308: mol_type = other DNA
gatcacctttaggctccacagcctctgccccagcaccctcagcactcccggcccctccagcacccccagtcttccatggcatgctggagcgggccccagcagagccctcctaccgtgctcccatggagaagcttttctacttacctcatgtctgcagctatacctgtctgtctcgagtcagacctatgaggaatgagcagtaccggggcaagaaccctctgctggtcccgttactatatgacttccggcggatgacagcccggcgtcgagttaaccgcaagatgggctttcatgttatctataagaca

SEQ ID NO: 95 - DNA, 326 bp, synthetic construct
  misc_feature 1..326: note = Description of artificial sequence: synthetic polynucleotide sequence
  source 1..326: mol_type = other DNA
ccttgtggtctctgccttcggacaatgcaggagatagaacgctaccttttcgagactggctgtgacttcctcttcctggagatgttctgtttggatccatatgttcttgtggaccgaaagtttcagccctataagcctttttactatattttggacatcacttatgggaaggaagatgttcccctatcctgtgtcaatgagattgacacaacccctccaccccaggtggcctacagcaaggaacgtatcccgggcaagggtgttttcattaacacaggccctgaatttctggttggctgtgactgcaaggatgggtgtcgggacaa

SEQ ID NO: 96 - DNA, 121 bp, synthetic construct
  misc_feature 1..121: note = Description of artificial sequence: synthetic polynucleotide sequence
  source 1..121: mol_type = other DNA
aggtccaagtgtgcctgccatcaactaactatccaggctacagcctgtaccccaggaggccaaatcaaccctaactctggctaccagtacaagagactagaagagtgtctacccacagggt

SEQ ID NO: 97 - DNA, 171 bp, synthetic construct
  misc_feature 1..171: note = Description of artificial sequence: synthetic polynucleotide sequence
  source 1..171: mol_type = other DNA
gggtatatgagtgtaacaaacgctgcaaatgtgacccaaacatgtgcacaaaccggttggtgcaacatggactacaagttcggctacagctattcaagacacagaacaagggctggggtatccgctgcttggatgacattgccaaaggctcttttgtttgtatttatgcag

SEQ ID NO: 98 - DNA, 305 bp, synthetic construct
  misc_feature 1..305: note = Description of artificial sequence: synthetic polynucleotide sequence
  source 1..305: mol_type = other DNA
ggcaaaatcctgacagatgactttgcagacaaggagggtctggaaatgggtgatgagtactttgcaaatctggaccatatcgagagcgtggagaacttcaaagaaggatatgagagtgatgccccctgttcctctgacagcagtggtgtagacttgaaggaccaggaagatggcaacagcggtacagaggaccctgaagagtccaatgatgatagctcagatgataacttctgtaaggatgaggacttcagcaccagttcagtgtggcggagctatgctacccggaggcagacccggggccagaa

SEQ ID NO: 99 - DNA, 325 bp, synthetic construct
  misc_feature 1..325: note = Description of artificial sequence: synthetic polynucleotide sequence
  source 1..325: mol_type = other DNA
agagaacggactctctgagacaacttccaaggactcccaccccccagatcttggacccccacatattcctgttcctccctcaatccctgtaggtggctgcaatccaccttcctccgaagagacacccaagaacaaggtggcctcatggttgagctgcaatagtgtcagtgaaggtggttttgctgactctgatagccattcatccttcaagactaatgaaggtggggagggccgggctgggggaagccgaatggaggctgagaaggcctccacctcaggactaggcatcaaggatgagggagacatcaaacaggccaagaaagag

SEQ ID NO: 100 - DNA, 121 bp, synthetic construct
  misc_feature 1..121: note = Description of artificial sequence: synthetic polynucleotide sequence
  source 1..121: mol_type = other DNA
acccgaggctgtgaaagcatttaacccttcacttgttcttttccaggacactgacgaccgaaacaagatgtcagtgtaagtgccttttgttttgttttgttttgagacagagtcttgcttt

SEQ ID NO: 101 - DNA, 134 bp, synthetic construct
  misc_feature 1..134: note = Description of artificial sequence: synthetic polynucleotide sequence
  source 1..134: mol_type = other DNA
gagttactgaaagctctcgaaattacggttacaatccttctcctgtgaagcctgaaggacttcgccgcccacctagtaagactagtatgcatcaaagccgaagactcatggcttctgctcagtccaaccctgat

SEQ ID NO: 102 - DNA, 167 bp, synthetic construct
  misc_feature 1..167: note = Description of artificial sequence: synthetic polynucleotide sequence
  source 1..167: mol_type = other DNA
ggatgtcctgacactgtccagcagcacagaaagtgagggggaaagtgggaccagccgaaagcccactgctggtcagacttcggctacagcggttgacagtgatgatatccagaccatatcctctggctctgaaggggatgactttgaggacaagaagaacatgactg

SEQ ID NO: 103 - DNA, 213 bp, synthetic construct
  misc_feature 1..213: note = Description of artificial sequence: synthetic polynucleotide sequence
  source 1..213: mol_type = other DNA
ggtccaatgaagcgtcaagtggcagtaaaatcaacccgaggctttgctcttaaatcaacccatgggattgcaattaaatcaaccaacatggcctctgtggacaagggggagagcgcacctgttcgtaagaacacacgccaattctatgatggcgaggagtcttgctacatcattgatgccaagcttgaaggcaacctgggccgctacctcaac

SEQ ID NO: 104 - DNA, 121 bp, synthetic construct
  misc_feature 1..121: note = Description of artificial sequence: synthetic polynucleotide sequence
  source 1..121: mol_type = other DNA
gtccttaaacctacagcacagttgcagccccaacctgtttgtccagaatgtcttcgtggatacccatgatcttcgcttcccctgggtggccttctttgccagcaagtaaggagtcaggaaa

SEQ ID NO: 105 - DNA, 121 bp, synthetic construct
  misc_feature 1..121: note = Description of artificial sequence: synthetic polynucleotide sequence
  source 1..121: mol_type = other DNA
agaagaatccgggctgggacagaacttacttgggactacaactacgaggtgggcagtgtggaaggcaaggagctactctgttgctgtggggccattgaatgcagaggacgtcttctttaga

SEQ ID NO: 106 - DNA, 121 bp, synthetic construct
  misc_feature 1..121: note = Description of artificial sequence: synthetic polynucleotide sequence
  source 1..121: mol_type = other DNA
ccattttttccagggattttttcaaggagattgagcaagatctggttgagtcgttcccgttggttatgccgtcgttcctcaggggtacaggttgactggggttcttgactactttcctctg

SEQ ID NO: 107 - DNA, 121 bp, synthetic construct
  misc_feature 1..121: note = Description of artificial sequence: synthetic polynucleotide sequence
  source 1..121: mol_type = other DNA
tcaccctcactgacgttagcagtggccccttcccgttctggctcctccaggctgggtatctcattggctgcttgctcttgactggctagaacctcttcaatcaagggtagagcatcatcct

SEQ ID NO: 108 - DNA, 121 bp, synthetic construct
  misc_feature 1..121: note = Description of artificial sequence: synthetic polynucleotide sequence
  source 1..121: mol_type = other DNA
cttactatgatcttctcttcctgggcagtaaaggcttcctcaaagtcttcatgcttctgaagaagggcttctgcactgcccagtgagtttcccagatcctcgttttccaggaaggcctgta

SEQ ID NO: 109 - DNA, 121 bp, synthetic construct
  misc_feature 1..121: note = Description of artificial sequence: synthetic polynucleotide sequence
  source 1..121: mol_type = other DNA
tctcccctgcagaaccaacaaaggacgggacatcaagaccatcaagtctctgcgggtgctccgagttctaaggccactgaaaaccatcaagcgcttgcccaagctcaaggtagtgtttaca

SEQ ID NO: 110 - DNA, 150 bp, synthetic construct
  misc_feature 1..150: note = Description of artificial sequence: synthetic polynucleotide sequence
  source 1..150: mol_type = other DNA
agttccacccataatcaataaaggggacctttgggggccaggtctttcccctaaagaagtgaagatcaaagtaaacaacactctgaccttggaatgtgaagcgtatgcaattccttctgcctccctcagctggtacaaggatggacaggc

SEQ ID NO: 111 - DNA, 121 bp, synthetic construct
  misc_feature 1..121: note = Description of artificial sequence: synthetic polynucleotide sequence
  source 1..121: mol_type = other DNA
tgagtgcaaatggcagcacattaaacatttatggagctcttacatctgacacggggaaatacacatgtgttgctactaatcccgctggagaagaagaccgaatttttaacttgaatgtcta

SEQ ID NO: 112 - DNA, 207 bp, synthetic construct
  misc_feature 1..207: note = Description of artificial sequence: synthetic polynucleotide sequence
  source 1..207: mol_type = other DNA
acctgaatgtcatagatagtgaagggagacaggtctctcagaataaacgacccaggcacattcattccagtcttgtagagcttattatttacatagatagaatactcagtgacaacaccatttgggtttgaaggagatgtccagatgacacgtacagctgtactgttgatgatgacaacctctggaggaagcatgccctgaggctct

SEQ ID NO: 113 - DNA, 121 bp, synthetic construct
  misc_feature 1..121: note = Description of artificial sequence: synthetic polynucleotide sequence
  source 1..121: mol_type = other DNA
tttaaggggatatattttggatggggacattcatacttttattttccatttcttctttagaacaaactgcctattttattggcatttttaccttcctgtgggtagaacggcccatgacggc

SEQ ID NO: 114 - DNA, 121 bp, synthetic construct
  misc_feature 1..121: note = Description of artificial sequence: synthetic polynucleotide sequence
  source 1..121: mol_type = other DNA
agcccaacttcattttgctgctgaaagcattattattatctagctacggaaaactcttgctgattccagctgtcatttgggaacatgactacacatctgtgtgcctcaaactcattaaagt

SEQ ID NO: 115 - DNA, 357 bp, synthetic construct
  misc_feature 1..357: note = Description of artificial sequence: synthetic polynucleotide sequence
  source 1..357: mol_type = other DNA
gtcacgagtctctctcttttttcactttcacatctccagcaaggatggttgcaatttccccttgcataaaggcccaggggacattggagcccacaagagggcatttttccccactgggacaatagacctctccactagctccctgctgtttgatgctttgtctggagcaagggaagcagaacttgtgcgaagggacggacgggcactgcacaaaatgggtgtcctccagccgctcgtggcagagggtgcagcacagcggggcactggttgccagagaggagtccgggaggctggcagggtgcactggctccagtcctcctgtgttgcctgctccctggccccccacctctctggggc

SEQ ID NO: 116 - DNA, 360 bp, synthetic construct
  misc_feature 1..360: note = Description of artificial sequence: synthetic polynucleotide sequence
  source 1..360: mol_type = other DNA
ccagccttctttggttcatagaggacggagagggcggactgttgctattcctcctggtagtggagtgaacctggttggcatcttttgaggcatgactgccccctgcattgtctgctactaagatcagggctgccatgggggactggccattctgggccgcttcaggcggtgtggtccggttggaatgaggtgaggcagtgggtggtggcggagacacaaaagaggatgtaggagtcatggggatcttgagcccctctgtggatgtggacagccacggctgggcctctccgttgatcttagggggcccgacttcaccttctggttctggagagggcttccttttccttgctgttcttgcaa

SEQ ID NO: 117 - DNA, 233 bp, synthetic construct
  misc_feature 1..233: note = Description of artificial sequence: synthetic polynucleotide sequence
  source 1..233: mol_type = other DNA
cctgctttagacccgttggccccgttggcctcgaaacccaacaacctgcctgcagtcagggccggctccttcttaaacttgctctcgaagggccccgagtggccgtgctggtgcagcgccagcagcgtgtcgcgcacggtcttgggcctgttgacccagtcctgctctccagacccgcggctcttgcccgcaccttccgcgctcagctcggcggccccggccgcggtggacag

SEQ ID NO: 118 - DNA, 463 bp, synthetic construct
  misc_feature 1..463: note = Description of artificial sequence: synthetic polynucleotide sequence
  source 1..463: mol_type = other DNA
gctgtcggccgggccccggtgcgcaggcggcggcggttgtttctccttggctgccgcctcacgctgctcgtgctccacggcagcgctgctcgacacggatgccggccgcttgtgggcgcccagatcggtgggctgcgcggagcccaggctggcggccgcggttccggacaccgcggctaaggaggcggcagcgcggccgccgaggccgagcgcggtgggcagcggcgtggccgagccgttcatgagcggcaccagggtgggcggcaccgcgtggccgcgccgcgggttcgggctctggcgattcagctcgggcggctcctctagcttggagaagccgttgggcaccaggatgccgttcacgggcggcggctgcggcgtcggcggctgggccaggctcgctgccgggcggctgctgccgaagtcagagccgaggcgcgggggcctctcggccgcggccgccaac

SEQ ID NO: 119 - DNA, 353 bp, synthetic construct
  misc_feature 1..353: note = Description of artificial sequence: synthetic polynucleotide sequence
  source 1..353: mol_type = other DNA
gggtagcgctccaaggcctgcggcgcgcgcggggccgcctcggggccgccgtggccaagctgctgctgctgctgcaaaaggatgtccttggcggagagcggcggcggcttggcggcggccgaggccgcggcgccgggtggggagcgaccctccgggaagcagccgtgcgcccgcttgagctgccgcgccgtctcgatgacgaactcgacgcggtcggcgccctcgtagttgacgcagccgcggcagacgggttcggtgaagtcccagatcatggcccagggcatgcggggcaggtcacacaggtagcacgactgccgccgggacgcggccgccaccgccaccgccgcggccat

SEQ ID NO: 120 - DNA, 162 bp, synthetic construct
  misc_feature 1..162: note = Description of artificial sequence: synthetic polynucleotide sequence
  source 1..162: mol_type = other DNA
catggggatacagggattgctacaatttatcaaagaagcttcagaacccatccatgtgaggaagtataaagggcaggtagtagctgtggatacatattgctggcttcacaaaggagctattgcttgtgctgaaaaactagccaaaggtgaacctactgatag

SEQ ID NO: 121 - DNA, 121 bp, synthetic construct
  misc_feature 1..121: note = Description of artificial sequence: synthetic polynucleotide sequence
  source 1..121: mol_type = other DNA
ggtatgtaggattttgtatgaaatttgtaaatatgttactatctcatgggatcaagcctattctcgtatttgatggatgtactttaccttctaaaaaggaagtagagagatctagaagaga

SEQ ID NO: 122 - DNA, 121 bp, synthetic construct
  misc_feature 1..121: note = Description of artificial sequence: synthetic polynucleotide sequence
  source 1..121: mol_type = other DNA
agacgacaagccaatcttcttaagggaaagcaacttcttcgtgaggggaaagtctcggaagctcgagagtgtttcacccggtctatcaatatcacacatgccatggcccacaaagtaatta

SEQ ID NO: 123 - DNA, 139 bp, synthetic construct
  misc_feature 1..139: note = Description of artificial sequence: synthetic polynucleotide sequence
  source 1..139: mol_type = other DNA
ggctgcccggtctcagggggtagattgcctcgtggctccctatgaagctgatgcgcagttggcctatcttaacaaagcgggaattgtgcaagccataattacagaggactcggatctcctagcttttggctgtaaaaag

SEQ ID NO: 124 - DNA, 214 bp, synthetic construct
  misc_feature 1..214: note = Description of artificial sequence: synthetic polynucleotide sequence
  source 1..214: mol_type = other DNA
ggtaattttaaagatggaccagtttggaaatggacttgaaattgatcaagctcggctaggaatgtgcagacagcttggggatgtattcacggaagagaagtttcgttacatgtgtattctttcaggttgtgactacctgtcatcactgcgtgggattggattagcaaaggcatgcaaagtcctaagactagccaataatccagatatagtaaag

SEQ ID NO: 125 - DNA, 189 bp, synthetic construct
  misc_feature 1..189: note = Description of artificial sequence: synthetic polynucleotide sequence
  source 1..189: mol_type = other DNA
ggttatcaagaaaattggacattatctcaagatgaatatcacggtaccagaggattacatcaacgggtttattcgggccaacaataccttcctctatcagctagtttttgatcccatcaaaaggaaacttattcctctgaacgcctatgaagatgatgttgatcctgaaacactaagctacgctgggca

SEQ ID NO: 126 - DNA, 121 bp, synthetic construct
  misc_feature 1..121: note = Description of artificial sequence: synthetic polynucleotide sequence
  source 1..121: mol_type = other DNA
ttgctaatctagatatgttgatgattccatagctcttcaaatagcacttggaaataaagatataaatacttttgaacagatcgatgactacaatccagacactgctatggtaacgttttga

SEQ ID NO: 127 - DNA, 227 bp, synthetic construct
  misc_feature 1..227: note = Description of artificial sequence: synthetic polynucleotide sequence
  source 1..227: mol_type = other DNA
gcctgcccattcaagaagtcatagttgggatgacaaaacatgtcaaaagtcagctaatgttagcagcatttggcataggaattactctcccagaccagagtcgggtactgtttcagatgccccacaattgaaggaaaatccaagtactgtgggagtggaacgagtgattagtactaaagggttaaatctcccaaggaaatcatccattgtgaaaagaccaagaagtg

SEQ ID NO: 128 - DNA, 121 bp, synthetic construct
  misc_feature 1..121: note = Description of artificial sequence: synthetic polynucleotide sequence
  source 1..121: mol_type = other DNA
gcagagctgtcagaagatgacctgttgagtcagtattctctttcatttacgaagaagaccaagaaaaatagctctgaaggcaataaatcattgagcttttctgaagtgtttgtgcctgacc

SEQ ID NO: 129 - DNA, 121 bp, synthetic construct
  misc_feature 1..121: note = Description of artificial sequence: synthetic polynucleotide sequence
  source 1..121: mol_type = other DNA
atggacctactaacaaaaagagtgtaagcactccacctaggacgagaaataaatttgcaacatttttacaaaggaaaaatgaagaaagtggtgcagttgtggttccagggaccagaagcag

SEQ ID NO: 130 - DNA, 238 bp, synthetic construct
  misc_feature 1..238: note = Description of artificial sequence: synthetic polynucleotide sequence
  source 1..238: mol_type = other DNA
ggtttttttgcagttcagattctactgactgtgtatcaaacaaagtgagcatccagcctctggatgaaactgctgtcacagataaagagaacaatctgcatgaatcagagtatggagaccaagaaggcaagagactggttgacacagatgtagcacgtaattcaagtgatgacattccgaataatcatattccaggtgatcatattccagacaaggcaacagtgtttacagatgaaga

SEQ ID NO: 131 - DNA, 358 bp, synthetic construct
  misc_feature 1..358: note = Description of artificial sequence: synthetic polynucleotide sequence
  source 1..358: mol_type = other DNA
gtcctactcttttgagagcagcaaatttacaaggaccatttcaccacccactttgggaacactaagaagttgttttagttggtctggaggtcttggagatttttcaagaacgccgagcccctctccaagcacagcattgcagcagttccgaagaaagagcgattcccccacctctttgcctgagaataatatgtctgatgtgtcgcagttaaagagcgaggagtccagtgacgatgagtctcatcccttacgagaagaggcatgttcttcacagtcccaggaaagtggagaattctcactgcagagttcaaatgcatcaaagctttctcagtgctctagtaaggactctgattcagag

SEQ ID NO: 132 - DNA, 121 bp, synthetic construct
  misc_feature 1..121: note = Description of artificial sequence: synthetic polynucleotide sequence
  source 1..121: mol_type = other DNA
gggactctaggaatctgattgcaatattaagttacttgacagtcaaagtgaccagacctccaagctacgtttatctcatttctcaaaaaaagacacacctctaaggaacaaggtaaaacat

SEQ ID NO: 133 - DNA, 195 bp, synthetic construct
  misc_feature 1..195: note = Description of artificial sequence: synthetic polynucleotide sequence
  source 1..195: mol_type = other DNA
ggttcctgggctatataagtccagttctgcagactctctttctacaaccaagatcaaacctctaggacctgccagagccagtgggctgagcaagaagccggcaagcatccagaagagaaagcatcataatgccgagaacaagccggggttacagatcaaactcaatgagctctggaaaaactttggatttaaaaa

SEQ ID NO: 134 - DNA, 137 bp, synthetic construct
  misc_feature 1..137: note = Description of artificial sequence: synthetic polynucleotide sequence
  source 1..137: mol_type = other DNA
gagattctgaaaagcttcctccttgtaagaaacccctgtccccagtcagagataacatccaactaactccagaagcggaagaggatatatttaacaaacctgaatgtggccgtgttcaaagagcaatattccagtaa

SEQ ID NO: 135 - DNA, 180 bp, synthetic construct
  misc_feature 1..180: note = Description of artificial sequence: synthetic polynucleotide sequence
  source 1..180: mol_type = other DNA
accataatgccatgccaccctcttggaaactgtggagccataagctgtagcagatgagtccatttggagaagcagtttggcaggcgaccagtgggcgaggatctcacttctggcttctgcttgcaaacggggtatggaaataacacccttgatttttctttcttcctttgtgtcacaact

SEQ ID NO: 136 - DNA, 212 bp, synthetic construct
  misc_feature 1..212: note = Description of artificial sequence: synthetic polynucleotide sequence
  source 1..212: mol_type = other DNA
catggcggtgcagccgaaggagacgctgcagttggagagcgcggccgaggtcggcttcgtgcgcttctttcagggcatgccggagaagccgaccaccacagtgcgccttttcgaccggggcgacttctatacggcgcacggcgaggacgcgctgctggccgcccgggaggtgttcaagacccagggggtgatcaagtacatggggccggcag

SEQ ID NO: 137 - DNA, 156 bp, synthetic construct
  misc_feature 1..156: note = Description of artificial sequence: synthetic polynucleotide sequence
  source 1..156: mol_type = other DNA
ggagcaaagaatctgcagagtgttgtgcttagtaaaatgaattttgaatcttttgtaaaagatcttcttctggttcgtcagtatagagttgaagtttataagaatagagctggaaataaggcatccaaggagaatgattggtatttggcatataag

SEQ ID NO: 138 - DNA, 280 bp, synthetic construct
  misc_feature 1..280: note = Description of artificial sequence: synthetic polynucleotide sequence
  source 1..280: mol_type = other DNA
ggcttctcctggcaatctctctcagtttgaagacattctctttggtaacaatgatatgtcagcttccattggtgttgtgggtgttaaaatgtccgcagttgatggccagagacaggttggagttgggtatgtggattccatacagaggaaactaggactgtgtgaattccctgataatgatcagttctccaatcttgaggctctcctcatccagattggaccaaaggaatgtgttttacccggaggagagactgctggagacatggggaaactgagacag

SEQ ID NO: 139 - DNA, 148 bp, synthetic construct
  misc_feature 1..148: note = Description of artificial sequence: synthetic polynucleotide sequence
  source 1..148: mol_type = other DNA
gataattcaaagaggaggaattctgatcacagaaagaaaaaaagctgacttttccacaaaagacatttatcaggacctcaaccggttgttgaaaggcaaaaagggagagcagatgaatagtgctgtattgccagaaatggagaatcag

SEQ ID NO: 140 - DNA, 151 bp, synthetic construct
  misc_feature 1..151: note = Description of artificial sequence: synthetic polynucleotide sequence
  source 1..151: mol_type = other DNA
ggttgcagtttcatcactgtctgcggtaatcaagtttttagaactcttatcagatgattccaactttggacagtttgaactgactacttttgacttcagccagtatatgaaattggatattgcagcagtcagagcccttaacctttttcag

SEQ ID NO: 141 - DNA, 135 bp, synthetic construct
  misc_feature 1..135: note = Description of artificial sequence: synthetic polynucleotide sequence
  source 1..135: mol_type = other DNA
gggttctgttgaagataccactggctctcagtctctggctgccttgctgaataagtgtaaaacccctcaaggacaaagacttgttaaccagtggattaagcagcctctcatggataagaacagaatagaggagag

SEQ ID NO: 142 - DNA, 201 bp, synthetic construct
  misc_feature 1..201: note = Description of artificial sequence: synthetic polynucleotide sequence
  source 1..201: mol_type = other DNA
gattgaatttagtggaagcttttgtagaagatgcagaattgaggcagactttacaagaagatttacttcgtcgattcccagatcttaaccgacttgccaagaagtttcaaagacaagcagcaaacttacaagattgttaccgactctatcagggtataaatcaactacctaatgttatacaggctctggaaaaacatgaag

SEQ ID NO: 143 - DNA, 121 bp, synthetic construct
  misc_feature 1..121: note = Description of artificial sequence: synthetic polynucleotide sequence
  source 1..121: mol_type = other DNA
ttttaggaaaacaccagaaattattgttggcagtttttgtgactcctcttactgatcttcgttctgacttctccaagtttcaggaaatgatagaaacaactttagatatggatcaggtatg

SEQ ID NO: 144 - DNA, 121 bp, synthetic construct
  misc_feature 1..121: note = Description of artificial sequence: synthetic polynucleotide sequence
  source 1..121: mol_type = other DNA
tggaaaaccatgaattccttgtaaaaccttcatttgatcctaatctcagtgaattaagagaaataatgaatgacttggaaaagaagatgcagtcaacattaataagtgcagccagagatct

SEQ ID NO: 145 - DNA, 152 bp, synthetic construct
  misc_feature 1..152: note = Description of artificial sequence: synthetic polynucleotide sequence
  source 1..152: mol_type = other DNA
ggcttggaccctggcaaacagattaaactggattccagtgcacagtttggatattactttcgtgtaacctgtaaggaagaaaaagtccttcgtaacaataaaaactttagtactgtagatatccagaagaatggtgttaaatttaccaacag

SEQ ID NO: 146 - DNA, 121 bp, synthetic construct
  misc_feature 1..121: note = Description of artificial sequence: synthetic polynucleotide sequence
  source 1..121: mol_type = other DNA
ttcgatttgcagcaaattgacttctttaaatgaagagtataccaaaaataaaacagaatatgaagaagcccaggatgccattgttaaagaaattgtcaatatttcttcaggtaaacttaat

SEQ ID NO: 147 - DNA, 121 bp, synthetic construct
  misc_feature 1..121: note = Description of artificial sequence: synthetic polynucleotide sequence
  source 1..121: mol_type = other DNA
ggctatgtagaaccaatgcagacactcaatgatgtgttagctcagctagatgctgttgtcagctttgctcacgtgtcaaatggagcacctgttccatatgtacgaccagccattttggaga

SEQ ID NO: 148 - DNA, 121 bp, synthetic construct
  misc_feature 1..121: note = Description of artificial sequence: synthetic polynucleotide sequence
  source 1..121: mol_type = other DNA
caaggaagaattatattaaaagcatccaggcatgcttgtgttgaagttcaagatgaaattgcatttattcctaatgacgtatactttgaaaaagataaacagatgttccacatcattactg

SEQ ID NO: 149 - DNA, 206 bp, synthetic construct
  misc_feature 1..206: note = Description of artificial sequence: synthetic polynucleotide sequence
  source 1..206: mol_type = other DNA
ggccccaatatgggaggtaaatcaacatatattcgacaaactggggtgatagtactcatggcccaaattgggtgttttgtgccatgtgagtcagcagaagtgtccattgtggactgcatcttagcccgagtaggggctggtgacagtcaattgaaaggagtctccacgttcatggctgaaatgttggaaactgcttctatcctcag

SEQ ID NO: 150 - DNA, 121 bp, synthetic construct
  misc_feature 1..121: note = Description of artificial sequence: synthetic polynucleotide sequence
  source 1..121: mol_type = other DNA
ggtctgcaaccaaagattcattaataatcatagatgaattgggaagaggaacttctacctacgatggatttgggttagcatgggctatatcagaatacattgcaacaaagattggtgcttt

SEQ ID NO: 151 - DNA, 121 bp, synthetic construct
  misc_feature 1..121: note = Description of artificial sequence: synthetic polynucleotide sequence
  source 1..121: mol_type = other DNA
tttgcaacccattttcatgaacttactgccttggccaatcagataccaactgttaataatctacatgtcacagcactcaccactgaagagaccttaactatgctttatcaggtgaagaaag

SEQ ID NO: 152 - DNA, 177 bp, synthetic construct
  misc_feature 1..177: note = Description of artificial sequence: synthetic polynucleotide sequence
  source 1..177: mol_type = other DNA
ggtgtctgtgatcaaagttttgggattcatgttgcagagcttgctaatttccctaagcatgtaatagagtgtgctaaacagaaagccctggaacttgaggagtttcagtatattggagaatcgcaaggatatgatatcatggaaccagcagcaaagaagtgctatctggaaagagag

SEQ ID NO: 153 - DNA, 172 bp, synthetic construct
  misc_feature 1..172: note = Description of artificial sequence: synthetic polynucleotide sequence
  source 1..172: mol_type = other DNA
gcaaggtgaaaaaattattcaggagttcctgtccaaggtgaaacaaatgccctttactgaaatgtcagaagaaaacatcacaataaagttaaaacagctaaaagctgaagtaatagcaaagaataatagctttgtaaatgaaatcatttcacgaataaaagttactacgtga

SEQ ID NO: 154 - DNA, 261 bp, synthetic construct
  misc_feature 1..261: note = Description of artificial sequence: synthetic polynucleotide sequence
  source 1..261: mol_type = other DNA
tatgtcgcgacagagcaccctgtacagcttcttccccaagtctccggcgctgagtgatgccaacaaggcctcggccagggcctcacgcgaaggcggccgtgccgccgctgcccccggggcctctccttccccaggcggggatgcggcctggagcgaggctgggcctgggcccaggcccttggcgcgctccgcgtcaccgcccaaggcgaagaacctcaacggagggctgcggagatcggtagcgcctgctgcccccaccag

SEQ ID NO: 155 - DNA, 198 bp, synthetic construct
  misc_feature 1..198: note = Description of artificial sequence: synthetic polynucleotide sequence
  source 1..198: mol_type = other DNA
gttgtgacttctcaccaggagatttggtttgggccaagatggagggttacccctggtggccttgtctggtttacaaccacccctttgatggaacattcatccgcgagaaagggaaatcagtccgtgttcatgtacagttttttgatgacagcccaacaaggggctgggttagcaaaaggcttttaaagccatatacag

SEQ ID NO: 156 - DNA, 171 bp, synthetic construct
  misc_feature 1..171: note = Description of artificial sequence: synthetic polynucleotide sequence
  source 1..171: mol_type = other DNA
ggttcaaaatcaaaggaagcccagaagggaggtcatttttacagtgcaaagcctgaaatactgagagcaatgcaacgtgcagatgaagccttaaataaagacaagattaagaggcttgaattggcagtttgtgatgagccctcagagccagaagaggaagaagagatggag

SEQ ID NO: 157 - DNA, 346 bp, synthetic construct
  misc_feature 1..346: note = Description of artificial sequence: synthetic polynucleotide sequence
  source 1..346: mol_type = other DNA
ggtaggcacaacttacgtaacagataagagtgaagaagataatgaaattgagagtgaagaggaagtacagcctaagacacaaggatctaggcgaagtagccgccaaataaaaaaacgaagggtcatatcagattctgagagtgacattggtggctctgatgtggaatttaagccagacactaaggaggaaggaagcagtgatgaaataagcagtggagtgggggatagtgagagtgaaggcctgaacagccctgtcaaagttgctcgaaagcggaagagaatggtgactggaaatggctctcttaaaaggaaaagctctaggaaggaaacgccctcagccaccaaa

SEQ ID NO: 158 - DNA, 462 bp, synthetic construct
  misc_feature 1..462: note = Description of artificial sequence: synthetic polynucleotide sequence
  source 1..462: mol_type = other DNA
caagcaactagcatttcatcagaaaccaagaatactttgagagctttctctgcccctcaaaattctgaatcccaagcccacgttagtggaggtggtgatgacagtagtcgccctactgtttggtatcatgaaactttagaatggcttaaggaggaaaagagaagagatgagcacaggaggaggcctgatcaccccgattttgatgcatctacactctatgtgcctgaggatttcctcaattcttgtactcctgggatgaggaagtggtggcagattaagtctcagaactttgatcttgtcatctgttacaaggtggggaaattttatgagctgtaccacatggatgctcttattggagtcagtgaactggggctggtattcatgaaaggcaactgggcccattctggctttcctgaaattgcatttggccgttattcagattccctggtgcagaagggctat

SEQ ID NO: 159 - DNA, 462 bp, synthetic construct
  misc_feature 1..462: note = Description of artificial sequence: synthetic polynucleotide sequence
  source 1..462: mol_type = other DNA
aaagtagcacgagtggaacagactgagactccagaaatgatggaggcacgatgtagaaagatggcacatatatccaagtatgatagagtggtgaggagggagatctgtaggatcattaccaagggtacacagacttacagtgtgctggaaggtgatccctctgagaactacagtaagtatcttcttagcctcaaagaaaaagaggaagattcttctggccatactcgtgcatatggtgtgtgctttgttgatacttcactgggaaagtttttcataggtcagttttcagatgatcgccattgttcgagatttaggactctagtggcacactatcccccagtacaagttttatttgaaaaaggaaatctctcaaaggaaactaaaacaattctaaagagttcattgtcctgttctcttcaggaaggtctgatacccggctcccagttttgggatgcatccaaa

SEQ ID NO: 160 - DNA, 462 bp, synthetic construct
  misc_feature 1..462: note = Description of artificial sequence: synthetic polynucleotide sequence
  source 1..462: mol_type = other DNA
actttgagaactctccttgaggaagaatattttagggaaaagctaagtgatggcattggggtgatgttaccccaggtgcttaaaggtatgacttcagagtctgattccattgggttgacaccaggagagaaaagtgaattggccctctctgctctaggtggttgtgtcttctacctcaaaaaatgccttattgatcaggagcttttatcaatggctaattttgaagaatatattcccttggattctgacacagtcagcactacaagatctggtgctatcttcaccaaagcctatcaacgaatggtgctagatgcagtgacattaaacaacttggagatttttctgaatggaacaaatggttctactgaaggaaccctactagagagggttgatacttgccatactccttttggtaagcggctcctaaagcaatggctttgtgccccactctgtaaccattat

SEQ ID NO: 161 - DNA, 462 bp, synthetic construct
  misc_feature 1..462: note = Description of artificial sequence: synthetic polynucleotide sequence
  source 1..462: mol_type = other DNA
gctattaatgatcgtctagatgccatagaagacctcatggttgtgcctgacaaaatctccgaagttgtagagcttctaaagaagcttccagatcttgagaggctactcagtaaaattcataatgttgggtctcccctgaagagtcagaaccacccagacagcagggctataatgtatgaagaaactacatacagcaagaagaagattattgattttctttctgctctggaaggattcaaagtaatgtgtaaaattatagggatcatggaagaagttgctgatggttttaagtctaaaatccttaagcaggtcatctctctgcagacaaaaaatcctgaaggtcgttttcctgatttgactgtagaattgaaccgatgggatacagcctttgaccatgaaaaggctcgaaagactggacttattactcccaaagcaggctttgactctgattatgaccaagct

SEQ ID NO: 162 - DNA, 352 bp, synthetic construct
  misc_feature 1..352: note = Description of artificial sequence: synthetic polynucleotide sequence
  source 1..352: mol_type = other DNA
cttgctgacataagagaaaatgaacagagcctcctggaatacctagagaaacagcgcaacagaattggctgtaggaccatagtctattgggggattggtaggaaccgttaccagctggaaattcctgagaatttcaccactcgcaatttgccagaagaatacgagttgaaatctaccaagaagggctgtaaacgatactggaccaaaactattgaaaagaagttggctaatctcataaatgctgaagaacggagggatgtatcattgaaggactgcatgcggcgactgttctataactttgataaaaattacaaggactggcagtctgctgtagagtgtatcgcagtgttgg

SEQ ID NO: 163 - DNA, 267 bp, synthetic construct
  misc_feature 1..267: note = Description of artificial sequence: synthetic polynucleotide sequence
  source 1..267: mol_type = other DNA
gatgttttactgtgcctggctaactatagtcgagggggtgatggtcctatgtgtcgcccagtaattctgttgccggaagataccccccccttcttagagcttaaaggatcacgccatccttgcattacgaagactttttttggagatgattttattcctaatgacattctaataggctgtgaggaagaggagcaggaaaatggcaaagcctattgtgtgcttgttactggaccaaatatggggggcaagtctacgcttatgagacag

SEQ ID NO: 164 - DNA, 121 bp, synthetic construct
  misc_feature 1..121: note = Description of artificial sequence: synthetic polynucleotide sequence
  source 1..121: mol_type = other DNA
aggctggcttattagctgtaatggcccagatgggttgttacgtccctgctgaagtgtgcaggctcacaccaattgatagagtgtttactagacttggtgcctcagacagaataatgtcagg

SEQ ID NO: 165 - DNA, 121 bp, synthetic construct
  misc_feature 1..121: note = Description of artificial sequence: synthetic polynucleotide sequence
  source 1..121: mol_type = other DNA
tttttttttttttaaggtgaaagtacattttttgttgaattaagtgaaactgccagcatactcatgcatgcaacagcacattctctggtgcttgtggatgaattaggtaagacattaaact

SEQ ID NO: 166 - DNA, 156 bp, synthetic construct
  misc_feature 1..156: note = Description of artificial sequence: synthetic polynucleotide sequence
  source 1..156: mol_type = other DNA
ggaagaggtactgcaacatttgatgggacggcaatagcaaatgcagttgttaaagaacttgctgagactataaaatgtcgtacattattttcaactcactaccattcattagtagaagattattctcaaaatgttgctgtgcgcctaggacatatg

SEQ ID NO: 167 - DNA, 201 bp, synthetic construct
  misc_feature 1..201: note = Description of artificial sequence: synthetic polynucleotide sequence
  source 1..201: mol_type = other DNA
ggcatgcatggtagaaaatgaatgtgaagaccccagccaggagactattacgttcctctataaattcattaagggagcttgtcctaaaagctatggctttaatgcagcaaggcttgctaatctcccagaggaagttattcaaaagggacatagaaaagcaagagaatttgagaagatgaatcagtcactacgattatttcg

SEQ ID NO: 168 - DNA, 121 bp, synthetic construct
  misc_feature 1..121: note = Description of artificial sequence: synthetic polynucleotide sequence
  source 1..121: mol_type = other DNA
tttttttttttaattttaagggaagtttgcctggctagtgaaaggtcaactgtagatgctgaagctgtccataaattgctgactttgattaaggaattatagactgactacattggaagct

SEQ ID NO: 169 - DNA, 121 bp, synthetic construct
  misc_feature 1..121: note = Description of artificial sequence: synthetic polynucleotide sequence
  source 1..121: mol_type = other DNA
ttattttcacagttggatgtactggaatatatacatgaaaatgaatatgttcatggtgatataaaagcagcaaatctacttttgggttacaaaaatccagaccaggtaaatacatactttt

SEQ ID NO: 170 - DNA, 121 bp, synthetic construct
  misc_feature 1..121: note = Description of artificial sequence: synthetic polynucleotide sequence
  source 1..121: mol_type = other DNA
tatgtgtatgaaggagagggtgagatgggggtggagagagacaacagtgactgaattccatgtacactctgtctatgaacccctgtctttagagtcccatgtgtcattcatggggttttgg

SEQ ID NO: 171 - DNA, 121 bp, synthetic construct
  misc_feature 1..121: note = Description of artificial sequence: synthetic polynucleotide sequence
  source 1..121: mol_type = other DNA
tatataaaacatacagcacaggtttgatgaatatttttaagtgaacattcatgcaccttttgttctagtcaagaaaagagcattcccaacatgctaggagctcccttcttctttagcaccc

SEQ ID NO: 172 - DNA, 121 bp, synthetic construct
  misc_feature 1..121: note = Description of artificial sequence: synthetic polynucleotide sequence
  source 1..121: mol_type = other DNA
gttaaagtaactactacaacatccagactattgagcttaagtataaacttctcaaacttcgttttatcctttaattttagcttttggaatttgttgaaatgcctcttcagttcattaagca

SEQ ID NO: 173 - DNA, 121 bp, synthetic construct
  misc_feature 1..121: note = Description of artificial sequence: synthetic polynucleotide sequence
  source 1..121: mol_type = other DNA
aacatggggctagaaagtcaagagctgcatccagtgtcccatttttgtttagggcagaacgtatcattattacaatttccacattccttgggcttggggatgccacctctgtaggggttca

SEQ ID NO: 174 - DNA, 121 bp, synthetic construct
  misc_feature 1..121: note = Description of artificial sequence: synthetic polynucleotide sequence
  source 1..121: mol_type = other DNA
tagatgtttaaaggggttccacagtaagagaggggaggctttccaggggaagaccttgctatcatccttacatgatcccccaaagcagattttctttagtgaattaaccttttgcccttgt

SEQ ID NO: 175 - DNA, 121 bp, synthetic construct
  misc_feature 1..121: note = Description of artificial sequence: synthetic polynucleotide sequence
  source 1..121: mol_type = other DNA
gaaaaaaaagagaggcattttttttttctttaagagcctgctttgtgtcttctgagcagcgagcaaggttcaatcatgagccagtgagactgaacacctgggagcaagggcagatggacag

SEQ ID NO: 176 - DNA, 121 bp, synthetic construct
  misc_feature 1..121: note = Description of artificial sequence: synthetic polynucleotide sequence
  source 1..121: mol_type = other DNA
ggctggttctcattccctagattctcagtatcttggtctcatgatgagttgttgcatctaattattattctccctgagattattagggactatgccaacagaatcatttgcatccctggaa

SEQ ID NO: 177 - DNA, 121 bp, synthetic construct
  misc_feature 1..121: note = Description of artificial sequence: synthetic polynucleotide sequence
  source 1..121: mol_type = other DNA
ctcaccctacctcaagccactattaaaaccttgatatcataccacctcctaatggaagcacagccgctggttgactgaggagtggagtgccgggtaaagctgtgagaatcaagtctggtaa

SEQ ID NO: 178 - DNA, 121 bp, synthetic construct
  misc_feature 1..121: note = Description of artificial sequence: synthetic polynucleotide sequence
  source 1..121: mol_type = other DNA
catcactaagcttcatggttagaatccctttccaattggagtgttcctatcctcgtggcacgaatcacggtactttctatttttctgattttccaaaagaactgaaaaaggaagggatgct

SEQ ID NO: 179 - DNA, 121 bp, synthetic construct
  misc_feature 1..121: note = Description of artificial sequence: synthetic polynucleotide sequence
  source 1..121: mol_type = other DNA
gattatccttcccaaaacacaactttcaaccagtcagtctcctattcagtgactgccaatagcatcccatattataccacatcaagccaaattgccacatcaattttatttttctcagcct

SEQ ID NO: 180 - DNA, 121 bp, synthetic construct
  misc_feature 1..121: note = Description of artificial sequence: synthetic polynucleotide sequence
  source 1..121: mol_type = other DNA
gacaccgcctacttgtcttttgtgtttagcaaccatttccactgggtttgcaccactgcccctttcaatcccaccttctgagtcccatctaagacatctgaactggcagtctacaatgcaa

SEQ ID NO: 181 - DNA, 121 bp, synthetic construct
  misc_feature 1..121: note = Description of artificial sequence: synthetic polynucleotide sequence
  source 1..121: mol_type = other DNA
cctgggggcttcaaattttctcagaacttaagggctctcgagcttccatccgaaaactgccacacatcttgagctctctgggtactacgccgaatgggggtgtgtgaagaacctagaaaga

SEQ ID NO: 182 - DNA, 239 bp, synthetic construct
  misc_feature 1..239: note = Description of artificial sequence: synthetic polynucleotide sequence
  source 1..239: mol_type = other DNA
tctattcagtttttatatcattattcaacactcgatcactgtgccattttttcatgtgtttctccagggtactgtacacgctaaaaggcatcttacaaatttcacatttgtaaacgtccttccccacctggccatgcgttttcatgtgcctggtgagcttgctactctgggcacaggcatagttgcacagctcgcatttataaggcctttcgcccgtgtggcttctcctgtggacagtg

SEQ ID NO: 183 - DNA, 475 bp, synthetic construct
  misc_feature 1..475: note = Description of artificial sequence: synthetic polynucleotide sequence
  source 1..475: mol_type = other DNA
agattgctacagttcttgaagactttcccacagtactcacaagtgtcgctgcgtctgccctcttttgagctgggcctgcccgggcccggaccactaatatggggcgtgctccctccacttcccgtgccgctgcgccccgagatccctccgtccagctccccgggcggtgtggagaagcgcaaactcccgttctccgaggagtgctccgacgaggaggcaaaaggcgattgtctggagtctccgaagctaaggaagggatctttgagctgcctggaggccgcgtagccggcgagccactgcgagtacacgttctccgtgttgggcatcgcggccgggggcaggtcgaactccttctcgagcttgatgcgcttagagaaggggctcagcgagctggggctgcccagcagcagctttttggacaggccccccgaggccgactcgcccggggagcagccgcggccattaacagtgccat

SEQ ID NO: 184 - DNA, 474 bp, synthetic construct
  misc_feature 1..474: note = Description of artificial sequence: synthetic polynucleotide sequence
  source 1..474: mol_type = other DNA
cgtctatgcggtccgactcgccggccaccgagtcttcgtcgcaagtgtccctgtggccctcggcctcggccaggtggccgcgcttatgcttctcgcccaggacctggtggaaggcctcgctgaagtgctgcatggagctgagcaccatgccctgcatgacgtcgggcagggcgcggctctcgtcgcccacgcccacgaccgcgccccgcgagctgttctcgtggtggcgcgccgcctccaggctcagcccgaagccgtagtccaccctctcgctctccgtcagctcctcctcctcctcttcctcctcttcttcctcttcctcgtcgtcctcctcttcctcctcgtccccgttctccgggatcaggttggggtcgttctcgctcttgaacttggccaccacggacttgagcgcgctgctggcgctgcccaccaagtcgctggtgccgggttccggggagctggcggtggagagac

SEQ ID NO: 185 - DNA, 475 bp, synthetic construct
  misc_feature 1..475: note = Description of artificial sequence: synthetic polynucleotide sequence
  source 1..475: mol_type = other DNA
cgtcgtcggacttgaccgtcatgggggacgatttgtgcatgtgcgtcttcatgtggcgcttcagcttgctggcctgggtgcacgcgtggtcgcacaggttgcacttgtagggcttctcgcccgtgtggctgcgccggtgcaccaccaggttgctctgaaatttgaacgtcttgccgcagaactcgcatgacttggacttgaccgggggctgggagggaggaggggcggattgcagaggagggagggggggcgtcgccaggaagggcggcttgctacctggctggaatggttgcagtaacctttgcatagggctgggccggcctggggacagcggtgggctagacgtgttccctgccagctctctaagtctcctagagaaatccatggcgggaggctccatagccattggattcaaccgcagcaccctgtcaaaggcactcgggtgatgggtggccagggccatctcttccgcccc

SEQ ID NO: 186 - DNA, 359 bp, synthetic construct
  misc_feature 1..359: note = Description of artificial sequence: synthetic polynucleotide sequence
  source 1..359: mol_type = other DNA
caggcgctctatgcggtgggggtccaagtgatgtctcggtggtggactaaacagggggggagtgggtggaaagcgcccttctgccaggccggaagcctctctcgatactgatcctggtattcttagcaggttaaaggggttattgtctgcaatatgaatcccatggagaggtggctgggaaggacattctgcacctagtcctgaagggataccaacccgcggggtcaggggacttccgtgttcgctttctaagtagattcttaatccatgagtgttctgtgcgtgttgcaagagaaaccatgcactggtgaatggctgtttgcaagttgtacatgtgtagctgctgggctcatctttac

SEQ ID NO: 187 - DNA, 121 bp, synthetic construct
  misc_feature 1..121: note = Description of artificial sequence: synthetic polynucleotide sequence
  source 1..121: mol_type = other DNA
ctcaacttacaaataccctgcggggcatattctgcactcatcccaggcgtggggattagagctccatgtgcagaacgaggggaggagaggcccctccagtgcagaagtttatctgtgaaag

SEQ ID NO: 188 - DNA, 331 bp, synthetic construct
  misc_feature 1..331: note = Description of artificial sequence: synthetic polynucleotide sequence
  source 1..331: mol_type = other DNA
cctgctatgtgttcctgtttggggcaaattcctctagatgacgttgataaacaatcgtcatcctctggcgtgacctggatgccaacctccacgggattggatgcttttttcatctcgattggtgaaggggaaggtggcttatccacagctttttctaagcagaggctgccattgcattgtttccgtttgtgctcgataaaaataagaatgtcccccaatgggaagttcatctggcactgcccacaggtgaggaggtcatgatccccttctggagctcccaacgggccgtggtctggttcatcatctgtaagaatggcttcaagaggctcgg

SEQ ID NO: 189 - DNA, 121 bp, synthetic construct
  misc_feature 1..121: note = Description of artificial sequence: synthetic polynucleotide sequence
  source 1..121: mol_type = other DNA
aataattattattactattattgggttacttacgcgagaattcccgtttgcttaagtgctggggtttgccttgcttgcggcgagacatggtgggctgcggggcgggcggcggcggcggcgg

SEQ ID NO: 190 - DNA, 121 bp, synthetic construct
  misc_feature 1..121: note = Description of artificial sequence: synthetic polynucleotide sequence
  source 1..121: mol_type = other DNA
aggaaagtcagattggtccaaactacttgagccaccgaatttctttcaaaagtataggtacgtgaaattttgtattttgtatgtatgtgatttttttttttttaaagaagaatgttaaaca

SEQ ID NO: 191 - DNA, 121 bp, synthetic construct
  misc_feature 1..121: note = Description of artificial sequence: synthetic polynucleotide sequence
  source 1..121: mol_type = other DNA
ccgcctccggccaggacgctgggagctgcctgcgggaaggtgcggggagcggagccatggcctccggtgagtgttcatggggcgcgggcctgggccgggggaaaggagctcttctgaaggg

SEQ ID NO: 192 - DNA, 144 bp, synthetic construct
  misc_feature 1..144: note = Description of artificial sequence: synthetic polynucleotide sequence
  source 1..144: mol_type = other DNA
ggtgcgtataacccgtatatagagataattgaacaacccaggcagaggggaatgcgttttagatacaaatgtgaagggcgatcagcaggcagcattccaggggagcacagcacagacaacaaccgaacatacccttctatccag

SEQ ID NO: 193 - DNA, 150 bp, synthetic construct
  misc_feature 1..150: note = Description of artificial sequence: synthetic polynucleotide sequence
  source 1..150: mol_type = other DNA
gattatgaactattatggaaaaggaaaagtgagaattacattagtaacaaagaatgacccatataaacctcatcctcatgatttagttggaaaagactgcagagacggctactatgaagcagaatttggacaagaacgcagacctttgtt

SEQ ID NO: 194 - DNA, 121 bp, synthetic construct
  misc_feature 1..121: note = Description of artificial sequence: synthetic polynucleotide sequence
  source 1..121: mol_type = other DNA
tttttttcctgctagtttccaaaatttgggtattcgatgtgtgaagaaaaaagaagtaaaagaagctattattacaagaataaaggcaggaatcaatccattcaatggtaagtatgtttga

SEQ ID NO: 195 - DNA, 142 bp, synthetic construct
  misc_feature 1..142: note = Description of artificial sequence: synthetic polynucleotide sequence
  source 1..142: mol_type = other DNA
gtccctgaaaaacagctgaatgatattgaagattgtgacctcaatgtggtgagactgtgttttcaagtttttctccctgatgaacatggtaatttgacgactgctcttcctcctgttgtctcgaacccaatttatgacaacc

SEQ ID NO: 196 - DNA, 121 bp, synthetic construct
  misc_feature 1..121: note = Description of artificial sequence: synthetic polynucleotide sequence
  source 1..121: mol_type = other DNA
atatttaggtgctccaaatactgcagaattaaggatttgtcgtgtaaacaagaattgtggaagtgtcagaggaggagatgaaatatttctactttgtgacaaagttcagaaaggtatttat

SEQ ID NO: 197 - DNA, 214 bp, synthetic construct
  misc_feature 1..214: note = Description of artificial sequence: synthetic polynucleotide sequence
  source 1..214: mol_type = other DNA
gatgacatagaagttcgttttgtgttgaacgattgggaagcaaaaggcatcttttcacaagctgatgtacaccgtcaagtagccattgttttcaaaactccaccatattgcaaagctatcacagaacccgtaacagtaaaaatgcagttgcggagaccttctgaccaggaagttagtgaatctatggattttagatatctgccagatgaaaaag

SEQ ID NO: 198 - DNA, 121 bp, synthetic construct
  misc_feature 1..121: note = Description of artificial sequence: synthetic polynucleotide sequence
  source 1..121: mol_type = other DNA
tgctttcctggtttctttctaatcagatacttacggcaataaagcaaagaaacaaaagacaactctgcttttccagaaactgtgccaggatcacggtaagaatagtttggatcgattcata

SEQ ID NO: 199 - DNA, 121 bp, synthetic construct
  misc_feature 1..121: note = Description of artificial sequence: synthetic polynucleotide sequence
  source 1..121: mol_type = other DNA
ataatggaaaaactttatcctaacagttaattttcctgagagaccaagacctggtctcctcggttcaattggagaaggaagatacttcaaaaaaggtattttatttcctatagcatatttc

SEQ ID NO: 200 - DNA, 327 bp, synthetic construct
  misc_feature 1..327: note = Description of artificial sequence: synthetic polynucleotide sequence
  source 1..327: mol_type = other DNA
gaaccaaacttgttttctcatgatgcagttgtgagagaaatgcctacaggggtttcaagtcaagcagaatcctactatccctcacctgggcccatctcaagtggattgtcacatcatgcctcaatggcacctctgccttcttcaagctggtcatcagtggcccaccccaccccacgctcaggcaatacaaacccactgagtagtttttcaacaaggacacttccttctaattcgcaaggtatcccaccattcctgagaatacctgttgggaatgatttaaatgcttctaatgcttgcatttacaacaatgccgatgacatagtcgga

SEQ ID NO: 201 - DNA, 447 bp, synthetic construct
  misc_feature 1..447: note = Description of artificial sequence: synthetic polynucleotide sequence
  source 1..447: mol_type = other DNA
atggaagcgtcatccatgccatcagcagatttatatggtatttctgatcccaacatgctgtctaattgttctgtgaatatgatgacaaccagcagtgacagcatgggagagactgataatccaagacttctgagcatgaatcttgaaaacccctcatgtaattcagtgttagacccaagagacttgagacagctccatcagatgtcctcttccagtatgtcagcaggcgccaattccaatactactgtttttgtttcacaatcagatgcatttgagggatctgacttcagttgtgcagataacagcatgataaatgagtcgggaccatcaaacagtactaatccaaacagtcatggttttgttcaagatagtcagtattcaggtattggcagtatgcaaaatgagcaattgagtgactcctttccatatgaattttttcaagtataa

SEQ ID NO: 202 - DNA, 121 bp, synthetic construct
  misc_feature 1..121: note = Description of artificial sequence: synthetic polynucleotide sequence
  source 1..121: mol_type = other DNA
gcgagctcgcacagccaggggccttcggtgaaggacgcgcaaaggtgttttctggtcgatttttaagtcctaggggagaatatgacacacagtcccagagtcagagctttgccacccagtg

SEQ ID NO: 203 - DNA, 121 bp, synthetic construct
  misc_feature 1..121: note = Description of artificial sequence: synthetic polynucleotide sequence
  source 1..121: mol_type = other DNA
cgacgttcacattttcaactggttgataaaatacattaaaaggaacactaaggagaataaagattgtgagatgcccactttaggtaaaaaacaatctgttgcttaatttgtagtgaaattt

SEQ ID NO: 204 - DNA, 121 bp, synthetic construct
  misc_feature 1..121: note = Description of artificial sequence: synthetic polynucleotide sequence
  source 1..121: mol_type = other DNA
ttaatgctgccatgtcagtctgtgataatgtcaaatgcctgaaagaaaatattagtggaaataagtttttcttccttctgtattactttacagcgatttacaacatgtatcaaaaattgtt

SEQ ID NO: 205 - DNA, 121 bp, synthetic construct
  misc_feature 1..121: note = Description of artificial sequence: synthetic polynucleotide sequence
  source 1..121: mol_type = other DNA
ctcacaaaaattagtcttcgaaatacctaaagatgcatacctctgtgtccaggaattgatataagtaaatattttgagagtatgttcctttctgagctgcagtccatcaccaccttctaca

SEQ ID NO: 206 - DNA, 148 bp, synthetic construct
  misc_feature 1..148: note = Description of artificial sequence: synthetic polynucleotide sequence
  source 1..148: mol_type = other DNA
tttaatcacacatttcttctggaatctcatgtggattaaagatgccagggacagacatttgacgtttatgtttctcttcatcagcctgccgtagggctatttctctctcttccaaaaacaaatcagaagtgtcttcacctgcaaattc

SEQ ID NO: 207 - DNA, 121 bp, synthetic construct
  misc_feature 1..121: note = Description of artificial sequence: synthetic polynucleotide sequence
  source 1..121: mol_type = other DNA
ataaatacatacctttatttgaactaggaaatctcttaaatgttccttgaaagcaggaatatcttgatttaagctgaaaagccctgtcacaaagagctttacttgagcactgcaaatcaaa

SEQ ID NO: 208 - DNA, 161 bp, synthetic construct
  misc_feature 1..161: note = Description of artificial sequence: synthetic polynucleotide sequence
  source 1..161: mol_type = other DNA
ctcttgtaggtgagggaaggccgacttaaggagattagccacatattcctgaagaaagatttggttgttaactggatttccaggatttaatgatgtacttatttttccttcttcaaccaaattaaacatatatgcaagaattgatgcatgcattgttaaac

SEQ ID NO: 209 - DNA, 136 bp, synthetic construct
  misc_feature 1..136: note = Description of artificial sequence: synthetic polynucleotide sequence
  source 1..136: mol_type = other DNA
ccagcagtatgtgaagtgtctgtcacaacagaaaagatatgctggagaatatcacaaaaataagtttgataaaaactctgagctgcagcttcttcttgtgcaacattttgtaagagtgtaaaaagtatctgtaagc

SEQ ID NO: 210 - DNA, 170 bp, synthetic construct
  misc_feature 1..170: note = Description of artificial sequence: synthetic polynucleotide sequence
  source 1..170: mol_type = other DNA
cccgtatctgcgacattcctcatagtatgtttgaaagcccaaatgatggaatccaaaacaagtttaaactgtgtaggtggaatagcaaggaatgctgggaaacaatgagaattgacagcctgaagtagtaagaaaaagttcgttctatgttcaggatattcttcaaagtc

SEQ ID NO: 211 - DNA, 196 bp, synthetic construct
  misc_feature 1..196: note = Description of artificial sequence: synthetic polynucleotide sequence
  source 1..196: mol_type = other DNA
ccttatttatcatattcaatgtgcattcaaaaacagcatcaaatatttgaggtatttcagctgttatatgtccccctaacttgttgacaattatggccatagtactaagcacttctggttctctagcagctgggacatttctctgataatcaatgagaactgcatccaacagagggggaacaaaattttcagcgac

SEQ ID NO: 212 - DNA, 121 bp, synthetic construct
  misc_feature 1..121: note = Description of artificial sequence: synthetic polynucleotide sequence
  source 1..121: mol_type = other DNA
cacttaccatctgtggatcattggatcggctcacccaaccagatattaactttaaagtttccctttttacagttcgcatacttctaatcaatggttgctttgtaaccatttcacctacaaa

SEQ ID NO: 213 - DNA, 185 bp, synthetic construct
  misc_feature 1..185: note = Description of artificial sequence: synthetic polynucleotide sequence
  source 1..185: mol_type = other DNA
ccattagcttggatagctgcagaaatattttcactgaggcacttgtatacattaagcatatctaaataaattcttccaagctgaattacaaaggggtgtccaacagctttgcaggctctcacatttgttttcaaaatgctaccaagctgcttgactgtttcaggatctttcagtatatccacatt

SEQ ID NO: 214 - DNA, 136 bp, synthetic construct
  misc_feature 1..136: note = Description of artificial sequence: synthetic polynucleotide sequence
  source 1..136: mol_type = other DNA
ctttggttgcctgctggattatactatcccacacttgattagggagtaacatgtacttttctatcaagtgttcttgtactgtttgatctgtttgtgcaccaatcatgtaccccacagcttcataaaacgtatgaac

SEQ ID NO: 215 - DNA, 165 bp, synthetic construct
  misc_feature 1..165: note = Description of artificial sequence: synthetic polynucleotide sequence
  source 1..165: mol_type = other DNA
cctgttgaggctgaagatcacaaataatagtgttaatgttgttcaaaatttcatcaataaatggcatcacttctccaacctgaacctgaacgaaatgcctgcggcatttttgggctattttaatgaaagtatcacaagccatatcctggactccatcatgggtct

SEQ ID NO: 216 - DNA, 158 bp, synthetic construct
  misc_feature 1..158: note = Description of artificial sequence: synthetic polynucleotide sequence
  source 1..158: mol_type = other DNA
ccatgcatgaattcgaacagcttgttaactacagtcttcagaaatttccagtgagctctcaaaaaacgtgggtattgacctactatgtacatgatatttgatgcaataatagctttattatctttgcctcttttctgttcacataatcctaatagatc

SEQ ID NO: 217 - DNA, 183 bp, synthetic construct
  misc_feature 1..183: note = Description of artificial sequence: synthetic polynucleotide sequence
  source 1..183: mol_type = other DNA
cctttataacagtaacaagaaatcgtttttcgtcctcttcatgcattgctccactaatggagcctattgcccaacacaatgtattcaaatttttccatgaccactctgtaccattcacttgattgtgaagcttctctgtcattattctttctgtatctacataatccagatgagtaagataaa

SEQ ID NO: 218 - DNA, 140 bp, synthetic construct
  misc_feature 1..140: note = Description of artificial sequence: synthetic polynucleotide sequence
  source 1..140: mol_type = other DNA
cccaatgtttccctcatattcttatacaaatttatggaatctgtatccttcatgaattctctcacaacttctccttgatcattctctacaaccaatacttcctctggtttagccattcgactaaccattaataaacggac

SEQ ID NO: 219 - DNA, 199 bp, synthetic construct
  misc_feature 1..199: note = Description of artificial sequence: synthetic polynucleotide sequence
  source 1..199: mol_type = other DNA
ccttgaataacatgggcaaatatagctgtctcctgggaggaacatcaaaatgttgacttccagaaagcaacggagaggcagatgtagagaatggactctctctatagagttcagcagccaaatgattccagtattcaagacaaattttaaagatttcagtttcttctacttcagataccaacaacatataatgaagggc

SEQ ID NO: 220 - DNA, 160 bp, synthetic construct
  misc_feature 1..160: note = Description of artificial sequence: synthetic polynucleotide sequence
  source 1..160: mol_type = other DNA
cctccataagagtttccctgagatttaatcttttttctataagttgatcatgttccttaagaaaggtgcagagaaacaaactgagattttgaatgaagttctgttcatcatcttttccatttgagtacgcaagtcgaatattggtatttaaaggaagcat

SEQ ID NO: 221 - DNA, 121 bp, synthetic construct
  misc_feature 1..121: note = Description of artificial sequence: synthetic polynucleotide sequence
  source 1..121: mol_type = other DNA
tttagttgcatcattgtcagagtaaatagtgttacaaattgttcttcatattggcttacactcacaccagcaatctcagtgaggcacttcagagagacatttcgaaacattggaacattca

SEQ ID NO: 222 - DNA, 121 bp, synthetic construct
  misc_feature 1..121: note = Description of artificial sequence: synthetic polynucleotide sequence
  source 1..121: mol_type = other DNA
ccttataaatcaatgtgctgattaatttggtctcaaaaatatatcccaggggaatccagttcagaaatctgagcaatgtttccaaggttgcatgtacaagtggagcattttgagaattttc

SEQ ID NO: 223 - DNA, 121 bp, synthetic construct
  misc_feature 1..121: note = Description of artificial sequence: synthetic polynucleotide sequence
  source 1..121: mol_type = other DNA
attattgtttttaaaaatgaaattaaaaacacttaccattacaaactgacacagttgaaatatctgtgagaattcattgcacatgctaaaaaaaaaaacacacaaaaatatcagatttaga

SEQ ID NO: 224 - DNA, 183 bp, synthetic construct
  misc_feature 1..183: note = Description of artificial sequence: synthetic polynucleotide sequence
  source 1..183: mol_type = other DNA
cctgtcttttaaatgcttagatttgacttgggttatctgtccactagagaaatcaaatacttcttcactcaagagtttaagaatcaccatattattttgacagagactttcgctggtcctacttgctccaacaatatcactgataaaagttggccaatgtttgggccattcttgtttcagtat

SEQ ID NO: 225 - DNA, 121 bp, synthetic construct
  misc_feature 1..121: note = Description of artificial sequence: synthetic polynucleotide sequence
  source 1..121: mol_type = other DNA
ataattcttctaaggaaaacagttaagttaaagcttacctgaacaaggatcatatttaattttccgatatacaccttttctttctaaggaaaagtaaaagattaaatgagagcctgaggta

SEQ ID NO: 226 - DNA, 121 bp, synthetic construct
  misc_feature 1..121: note = Description of artificial sequence: synthetic polynucleotide sequence
  source 1..121: mol_type = other DNA
ctcccaataagctccaaaataaactcttacctctacacaagttgggtcagatgacgtcttgataatgaggccaacaacgtatttttttattcctattaaaaaaattgcacgtaataaaaaa

SEQ ID NO: 227 - DNA, 121 bp, synthetic construct
  misc_feature 1..121: note = Description of artificial sequence: synthetic polynucleotide sequence
  source 1..121: mol_type = other DNA
atttataattctttattttcctaccttcgcactggttccttggaagaatcttccaccttgtttttatcacattttccaaaatttgtagtccatagtactgaaaattggagaatagaagcat

SEQ ID NO: 228 - DNA, 121 bp, synthetic construct
  misc_feature 1..121: note = Description of artificial sequence: synthetic polynucleotide sequence
  source 1..121: mol_type = other DNA
acttgcttactttcgtattcatattctgagaaaattccaaaattgtgtcgactcttgtccaagcatcaggatgctcctttaaatgtgtcagtacttcttgagccattctttgctaaaatat

SEQ ID NO: 229 - DNA, 121 bp, synthetic construct
  misc_feature 1..121: note = Description of artificial sequence: synthetic polynucleotide sequence
  source 1..121: mol_type = other DNA
gggctccttctccatggtataagcaattcaccacattatctaataagttgatatccagtttttggctgaaatcaagcagctgacgagctgcatggtctgctaacattgtcataattgctgg

SEQ ID NO: 230 - DNA, 121 bp, synthetic construct
  misc_feature 1..121: note = Description of artificial sequence: synthetic polynucleotide sequence
  source 1..121: mol_type = other DNA
agtgcaacagggagggtttgtcactgctccacagtgtttgagtcctcagaggagaagactcgaacacaaagaatgagtcatttggctgggggatgaagtcatctggaggcttctccattat

SEQ ID NO: 231 - DNA, 121 bp, synthetic construct
  misc_feature 1..121: note = Description of artificial sequence: synthetic polynucleotide sequence
  source 1..121: mol_type = other DNA
tatttgagctaaactttgatgtgagtcataagccttagcccgggttgtcaggagtttctgcaattctttcattctttgcttctgtttagttaggatccgatttctctcttcttccaacatt

SEQ ID NO: 232 - DNA, 121 bp, synthetic construct
  misc_feature 1..121: note = Description of artificial sequence: synthetic polynucleotide sequence
  source 1..121: mol_type = other DNA
tggtggttattcctaccaccaccccaaactgcagacacgagccagagttccttgcttgaggaagaagacattaagaaacatttatttgttttgccagataccaaaaagtattcaggagagt

SEQ ID NO: 233 - DNA, 121 bp, synthetic construct
  misc_feature 1..121: note = Description of artificial sequence: synthetic polynucleotide sequence
  source 1..121: mol_type = other DNA
tctagtaatggaatgtaagagggaaactttgtggagtttaagtcataacttgtggtcttggttgtcaattcacatcatgtgattggaaattgaagatactgccccaaaggctgagactggg

SEQ ID NO: 234 - DNA, 121 bp, synthetic construct
  misc_feature 1..121: note = Description of artificial sequence: synthetic polynucleotide sequence
  source 1..121: mol_type = other DNA
ccgattggaatcactgaacacggcccggctgaagtttcccagccgctggcgcaccggatccggcagctccatgcctgggcctcagtatccctcaccccctcagacacgggctagtctgcgg

SEQ ID NO: 235 - DNA, 121 bp, synthetic construct
  misc_feature 1..121: note = Description of artificial sequence: synthetic polynucleotide sequence
  source 1..121: mol_type = other DNA
gggaccattcattgttacaaggggagaagcagggtacatgggtagagaagcagataggttggtagatttggttgggaaggatgtggacattctgttttctcagggaaatgatataagaaat

SEQ ID NO: 236 - DNA, 121 bp, synthetic construct
  misc_feature 1..121: note = Description of artificial sequence: synthetic polynucleotide sequence
  source 1..121: mol_type = other DNA
aaactagcaccctatacctggttgtcttcaaccaatcatgccaattttctcccctgcaggcttcctcagcaccttcaagcccccagcctacgaggatgtggttcaccgcccaggcacacca

SEQ ID NO: 237 - DNA, 121 bp, synthetic construct
  misc_feature 1..121: note = Description of artificial sequence: synthetic polynucleotide sequence
  source 1..121: mol_type = other DNA
cttatactgtggccccaggccgccccttgactgcttccagtgaacaaacctgctgttcctcctcatccagctgccctgcccactttgaaggaacaaatgtggaaggtgtttcctcccacca

SEQ ID NO: 238 - DNA, 121 bp, synthetic construct
  misc_feature 1..121: note = Description of artificial sequence: synthetic polynucleotide sequence
  source 1..121: mol_type = other DNA
cacagtgatcttcatctgaattgtcaccgcattcatcaatcccattgcacatttgctccgactgtaggcatattctgttatttctgcatctgtgaggtctcgtggatggacaaagaaattt

SEQ ID NO: 239 - DNA, 121 bp, synthetic construct
  misc_feature 1..121: note = Description of artificial sequence: synthetic polynucleotide sequence
  source 1..121: mol_type = other DNA
tgaaaatgatttattttacttttcttacttttcaggacctgtagatgaatacatgttgccatttgaggaggaaattggccagcatccatctcttgaagacatgcaggaagttgttgtgcat

SEQ ID NO: 240 - DNA, 121 bp, synthetic construct
  misc_feature 1..121: note = Description of artificial sequence: synthetic polynucleotide sequence
  source 1..121: mol_type = other DNA
agaggcctgttttaagagattattggcagaaacatgctgtaagttatccagttagcttttcatttgaaattccaataaaacacttttcagaggaattatttatctctgcacatttctcttt

SEQ ID NO: 241 - DNA, 121 bp, synthetic construct
  misc_feature 1..121: note = Description of artificial sequence: synthetic polynucleotide sequence
  source 1..121: mol_type = other DNA
cagcatatccctttctgcctctttatttgtcagttcttttggagcaggattaggggcagcatggacactcttggcagctgcagatgtcacatagtgacccgatactctcttctgcatctgc

SEQ ID NO: 242 - DNA, 121 bp, synthetic construct
  misc_feature 1..121: note = Description of artificial sequence: synthetic polynucleotide sequence
  source 1..121: mol_type = other DNA
agagctgggtttggcctgggcatttgaagcccgagatttaaattttgattccaaaatattgtttatttcttccaaatttggtgcaaaaggagctgtgccagtgtctcttgtcattttggga

SEQ ID NO: 243 - DNA, 121 bp, synthetic construct
  misc_feature 1..121: note = Description of artificial sequence: synthetic polynucleotide sequence
  source 1..121: mol_type = other DNA
gtttctcacctggattggctgaaccactttgacagcactgtctctggctgagtacattgggttttcaaatattatgggctgcttccccatttccatgacaaagtcttcactctgatggcag

SEQ ID NO: 244 - DNA, 121 bp, synthetic construct
  misc_feature 1..121: note = Description of artificial sequence: synthetic polynucleotide sequence
  source 1..121: mol_type = other DNA
acggcagtcattctcatcagctccatcggggcagtctctgacgtggtcgcacctgtattcacttgggatacactgaccattggagcatgttatctgatgacttgagcatgtactttgtgct

SEQ ID NO: 245 - DNA, 307 bp, synthetic construct
  misc_feature 1..307: note = Description of artificial sequence: synthetic polynucleotide sequence
  source 1..307: mol_type = other DNA
accaataggatcagcagctttgtagaattcagatggttcagaaaatggaccctgtccagcagcgtttacagcacaaactctgtattgatagtcactgttttctgtgagtcctgttactttttgtctggtgtcacggatagtctcttttagtactttaaaccatcctaggctcttcttgtctcgtttttcaaggaaatagccacttatatcactaccgccatctgcaattggcctgctccatacaacagtcatcgaattcttggtaatctttgtcacttctggtatgcctggtggcccaggtgtaact

SEQ ID NO: 246 - DNA, 304 bp, synthetic construct
  misc_feature 1..304: note = Description of artificial sequence: synthetic polynucleotide sequence
  source 1..304: mol_type = other DNA
actgaaacgatctttggctttcattgaatcagacaccagaggatcacttattccatacagattttcagcatgtatccggaaaatataatcttttccttcaagtagtttagaaactttgcatgttgttttagcacttgcagatgtcactggcatccagacgtctttacccacttccttcttctcaataatataattggtgattttactgcctccatcatctaaaggaggcttccaagagataaccatgtaatctttggtcacctcatcaaaactaactggtcctactggtggtccaggacggtct

SEQ ID NO: 247 - DNA, 289 bp, synthetic construct
  misc_feature 1..289: note = Description of artificial sequence: synthetic polynucleotide sequence
  source 1..289: mol_type = other DNA
accaaaaacttctaccctggctgctgcaaatttggaaccacagctatttgtagctgtaatcacatatctgccatggtcttttcgcagtgcatccttgataattagttcagatttggttccaacgttgtctattacaacacggtctttatccagctccccttcttctttggtccatacttttgtaggtacagggcgaccagtcaccacagctggaattctaagagtcttcccagccattatttgtattccacccttgacagaaacatccagttccacagctggaggctct

SEQ ID NO: 248 - DNA, 283 bp, synthetic construct
  misc_feature 1..283: note = Description of artificial sequence: synthetic polynucleotide sequence
  source 1..283: mol_type = other DNA
acctatgactttgacattgattgaggctgttgctgagccgagcttattctccagtgtaatggtataaattccggcatctgcacggacactcttgggaacttcaaggtgtgcagagatgtgatcattcttcattgttaatctatcacttgctttaacttctttgccatctttatgccaactaacagttggaactgggacagctctgaagggaacaggaatgcttaacttttcaccttcaataacaataatgtcatgagtctccaggtcaattgttggcttgcct

SEQ ID NO: 249 - DNA, 301 bp, synthetic construct
  misc_feature 1..301: note = Description of artificial sequence: synthetic polynucleotide sequence
  source 1..301: mol_type = other DNA
accaaactgatatttggctgttattggagaggcctgaactggttcaccaacaccatacatgttttctgcagcaactctgaagatgtactctttattggggattaatttggtggccttgaagtttgtatccttgacggtggatgagagcttgtgccacacttcactatcagttgctcgtctctccacaacatagtttgtgatcttagatccaccatcatcgcgtggtgggttccatgttagaagacatgactcattggttacatctgtgatgtcaaaggcagctggtggtccgggtttatct

SEQ ID NO: 250 - DNA, 406 bp, synthetic construct
  misc_feature 1..406: note = Description of artificial sequence: synthetic polynucleotide sequence
  source 1..406: mol_type = other DNA
accttctacaacaagtttagccgtggaggtcttttctttgtttcccaaacgtaaaacacaggtgtattcaccagcatcggaaagttgaacatcaatgatgtgcagctttctgtctttaccatctgcaataaacctgtgcttgggactctcacggatattgctaccgtctttcatccaggttgtaattgcagtggaaggggagaccaaacattcaaagattgctgaagagccaacgaactctgattctgtcaagatgatgtctttgatttctttcacaaacttcagtggcacagcctttagctggtaggtgaacggggcttcatcaggaggtttctctccaccacttcctggccttaactttctcctttcggcttctattggtgaaggagtctttttgggtacacct

SEQ ID NO: 251 - DNA, 276 bp, synthetic construct
  misc_feature 1..276: note = Description of artificial sequence: synthetic polynucleotide sequence
  source 1..276: mol_type = other DNA
accatcatgaaaccagaacgtctctggcataggtctaccaacaacctttaagtcaaatctggcagtttgcccttctaaacatttgaaagaaacaggttttaacacaaagactggtttatatagtctctcaagttgtgactcatctgtctcctccagcctacgtccaggggacattcttgcaggggacatccgtgcaggagacatccttgcaggtgacatccgtgcaggagacatgcgtataggagacctgctcactgaacgtggagagagagatct

SEQ ID NO: 252 - DNA, 121 bp, synthetic construct
  misc_feature 1..121: note = Description of artificial sequence: synthetic polynucleotide sequence
  source 1..121: mol_type = other DNA
attaaatgactcttagtctcaaagggaaagtttggcttgtttgaatacaaatgacttattgttagatgataagtaaggcatgtctttaatttatgtttaactttgttctcagttaaaaagc

SEQ ID NO: 253 - DNA, 121 bp, synthetic construct
  misc_feature 1..121: note = Description of artificial sequence: synthetic polynucleotide sequence
  source 1..121: mol_type = other DNA
agagaaggaaatggcagatcagacatgtattgaagaatttgtgatccacgcattggcattttgtgaaagcttatatgatccatatcggaattggagacatagaatttcagggtatgtctta

SEQ ID NO: 254 - DNA, 121 bp, synthetic construct
  misc_feature 1..121: note = Description of artificial sequence: synthetic polynucleotide sequence
  source 1..121: mol_type = other DNA
agaagccagtcttcggaaggatccaagaaatgctggcctaaaaggtaagagctgtcagtctagtgcttctgcagtggattttggtgcctcttccaagtcagcgctccatcgaagggctgat

SEQ ID NO: 255 - DNA, 121 bp, synthetic construct
  misc_feature 1..121: note = Description of artificial sequence: synthetic polynucleotide sequence
  source 1..121: mol_type = other DNA
acgttcgaagctaaaacatagagatctagaagtgagctgtgaaccggatggttttgagatgaattttcagtgtgctccccctcttccatctgatactgatcagcctcaagaaactgttaag

SEQ ID NO: 256 - DNA, 121 bp, synthetic construct
  misc_feature 1..121: note = Description of artificial sequence: synthetic polynucleotide sequence
  source 1..121: mol_type = other DNA
gctactacataatgaggccctgatcaggcacctgaatgctacttcctttgatgtggttttaacagaccccgttaacctctgcgcggcagtgctggctaagtacctgtcgattcctactgtg

SEQ ID NO: 257 - DNA, 121 bp, synthetic construct
  misc_feature 1..121: note = Description of artificial sequence: synthetic polynucleotide sequence
  source 1..121: mol_type = other DNA
tgaggaacattccatgtgatttagactttaagggcacacagtgtccaaacccttcctcctatattcctagattactaacaaccaattcagaccacatgacattcatgcaaagggtcaagaa

SEQ ID NO: 258 - DNA, 121 bp, synthetic construct
  misc_feature 1..121: note = Description of artificial sequence: synthetic polynucleotide sequence
  source 1..121: mol_type = other DNA
cttcactctaggagaaagaatgacgagaacataacactagagacagtttgccatgaccccaagctcccctaccatgactttattctggaagatgctgcttctccaaagtgcattatgaagg

SEQ ID NO: 259 - DNA, 121 bp, synthetic construct
  misc_feature 1..121: note = Description of artificial sequence: synthetic polynucleotide sequence
  source 1..121: mol_type = other DNA
agcctggtgagactttcttcatgtgttcctgtagctctgatgagtgcaatgacaacatcatcttctcagaaggtgagttttcttctcttaagggtgtgggacctgagatctgtgccaattt

SEQ ID NO: 260 - DNA, 121 bp, synthetic construct
  misc_feature 1..121: note = Description of artificial sequence: synthetic polynucleotide sequence
  source 1..121: mol_type = other DNA
aaaatgtcgttcgtggcaggggttattcggcggctggacgagacagtggtgaaccgcatcgcggcgggggaagttatccagcggccagctaatgctatcaaagagatgattgagaactggt

SEQ ID NO: 261 - DNA, 121 bp, synthetic construct
  misc_feature 1..121: note = Description of artificial sequence: synthetic polynucleotide sequence
  source 1..121: mol_type = other DNA
tgtttgatttgccagtttagatgcaaaatccacaagtattcaagtgattgttaaagagggaggcctgaagttgattcagatccaagacaatggcaccgggatcagggtaagtaaaacctca

SEQ ID NO: 262 - DNA, 121 bp, synthetic construct
  misc_feature 1..121: note = Description of artificial sequence: synthetic polynucleotide sequence
  source 1..121: mol_type = other DNA
gtatctaacagaaagaagatctggatattgtatgtgaaaggttcactactagtaaactgcagtcctttgaggatttagccagtatttctacctatggctttcgaggtgaggtaagctaaag

SEQ ID NO: 263 - DNA, 121 bp, synthetic construct
  misc_feature 1..121: note = Description of artificial sequence: synthetic polynucleotide sequence
  source 1..121: mol_type = other DNA
agtctattttcttttcttccttaggctttggccagcataagccatgtggctcatgttactattacaacgaaaacagctgatggaaagtgtgcatacaggtatagtgctgacttcttttact

SEQ ID NO: 264 - DNA, 121 bp, synthetic construct
  misc_feature 1..121: note = Description of artificial sequence: synthetic polynucleotide sequence
  source 1..121: mol_type = other DNA
taatttgttatattttctcattagagcaagttactcagatggaaaactgaaagcccctcctaaaccatgtgctggcaatcaagggacccagatcacggtaagaatggtacatgggagagta

SEQ ID NO: 265 - DNA, 121 bp, synthetic construct
  misc_feature 1..121: note = Description of artificial sequence: synthetic polynucleotide sequence
  source 1..121: mol_type = other DNA
caatcttctgttcaggtggaggaccttttttacaacatagccacgaggagaaaagctttaaaaaatccaagtgaagaatatgggaaaattttggaagttgttggcaggtacagtccaaaat

SEQ ID NO: 266 - DNA, 121 bp, synthetic construct
  misc_feature 1..121: note = Description of artificial sequence: synthetic polynucleotide sequence
  source 1..121: mol_type = other DNA
tggcaactcttttcttactcttttgtttttcttttccaggtattcagtacacaatgcaggcattagtttctcagttaaaaaagtaagttcttggtttatgggggatggttttgttttatga

SEQ ID NO: 267 - DNA, 121 bp, synthetic construct
  misc_feature 1..121: note = Description of artificial sequence: synthetic polynucleotide sequence
  source 1..121: mol_type = other DNA
gctgtttgtttatcagcaaggagagacagtagctgatgttaggacactacccaatgcctcaaccgtggacaatattcgctccatctttggaaatgctgttagtcggtatgtcgataaccta

SEQ ID NO: 268 - DNA, 121 bp, synthetic construct
  misc_feature 1..121: note = Description of artificial sequence: synthetic polynucleotide sequence
  source 1..121: mol_type = other DNA
atagagaactgatagaaattggatgtgaggataaaaccctagccttcaaaatgaatggttacatatccaatgcaaactactcagtgaagaagtgcatcttcttactcttcatcaaccgtaa

SEQ ID NO: 269 - DNA, 121 bp, synthetic construct
  misc_feature 1..121: note = Description of artificial sequence: synthetic polynucleotide sequence
  source 1..121: mol_type = other DNA
tttttattgtttagatcgtctggtagaatcaacttccttgagaaaagccatagaaacagtgtatgcagcctatttgcccaaaaacacacacccattcctgtacctcaggtaatgtagcacc

SEQ ID NO: 270 - DNA, 155 bp, synthetic construct
  misc_feature 1..155: note = Description of artificial sequence: synthetic polynucleotide sequence
  source 1..155: mol_type = other DNA
gtttagaaatcagtccccagaatgtggatgttaatgtgcaccccacaaagcatgaagttcacttcctgcacgaggagagcatcctggagcgggtgcagcagcacatcgagagcaagctcctgggctccaattcctccaggatgtacttcacccag

SEQ ID NO: 271 - DNA, 121 bp, synthetic construct
  misc_feature 1..121: note = Description of artificial sequence: synthetic polynucleotide sequence
  source 1..121: mol_type = other DNA
gactttgctaccaggacttgctggcccctctggggagatggttaaatccacaacaagtctgacctcgtcttctacttctggaagtagtgataaggtctatgcccaccagatggttcgtaca

SEQ ID NO: 272 - DNA, 121 bp, synthetic construct
  misc_feature 1..121: note = Description of artificial sequence: synthetic polynucleotide sequence
  source 1..121: mol_type = other DNA
cccgggaacagaagcttgatgcatttctgcagcctctgagcaaacccctgtccagtcagccccaggccattgtcacagaggataagacagatatttctagtggcagggctaggcagcaaga

SEQ ID NO: 273 - DNA, 121 bp, synthetic construct
  misc_feature 1..121: note = Description of artificial sequence: synthetic polynucleotide sequence
  source 1..121: mol_type = other DNA
agatgcttgaactcccagcccctgctgaagtggctgccaaaaatcagagcttggagggggatacaacaaaggggacttcagaaatgtcagagaagagaggacctacttccagcaaccccag

SEQ ID NO: 274 - DNA, 150 bp, synthetic construct
  misc_feature 1..150: note = Description of artificial sequence: synthetic polynucleotide sequence
  source 1..150: mol_type = other DNA
gaaagagacatcgggaagattctgatgtggaaatggtggaagatgattcccgaaaggaaatgactgcagcttgtaccccccggagaaggatcattaacctcactagtgttttgagtctccaggaagaaattaatgagcagggacatgagg

SEQ ID NO: 275 - DNA, 121 bp, synthetic construct
  misc_feature 1..121: note = Description of artificial sequence: synthetic polynucleotide sequence
  source 1..121: mol_type = other DNA
ttgcagttctccgggagatgttgcataaccactccttcgtgggctgtgtgaatcctcagtgggccttggcacagcatcaaaccaagttataccttctcaacaccaccaagcttaggtaaat

SEQ ID NO: 276 - DNA, 121 bp, synthetic construct
  misc_feature 1..121: note = Description of artificial sequence: synthetic polynucleotide sequence
  source 1..121: mol_type = other DNA
ccttaaagtcacttcatttttattttcagtgaagaactgttctaccagatactcatttatgattttgccaattttggtgttctcaggttatcggtaagtttagatccttttcacttctgaa

SEQ ID NO: 277 - DNA, 166 bp, synthetic construct
  misc_feature 1..166: note = Description of artificial sequence: synthetic polynucleotide sequence
  source 1..166: mol_type = other DNA
ggagccagcaccgctctttgaccttgccatgcttgccttagatagtccagagagtggctggacagaggaagatggtcccaaagaaggacttgctgaatacattgttgagtttctgaagaagaaggctgagatgcttgcagactatttctctttggaaattgatgag

SEQ ID NO: 278 - DNA, 121 bp, synthetic construct
  misc_feature 1..121: note = Description of artificial sequence: synthetic polynucleotide sequence
  source 1..121: mol_type = other DNA
tttcctgcaagcaggaagggaacctgattggattaccccttctgattgacaactatgtgccccctttggagggactgcctatcttcattcttcgactagccactgaggtcagtgatcaagc

SEQ ID NO: 279 - DNA, 121 bp, synthetic construct
  misc_feature 1..121: note = Description of artificial sequence: synthetic polynucleotide sequence
  source 1..121: mol_type = other DNA
ccaggtgaattgggacgaagaaaaggaatgttttgaaagcctcagtaaagaatgcgctatgttctattccatccggaagcagtacatatctgaggagtcgaccctctcaggccagcaggta

SEQ ID NO: 280 - DNA, 169 bp, synthetic construct
  misc_feature 1..169: note = Description of artificial sequence: synthetic polynucleotide sequence
  source 1..169: mol_type = other DNA
gagtgaagtgcctggctccattccaaactcctggaagtggactgtggaacacattgtctataaagccttgcgctcacacattctgcctcctaaacatttcacagaagatggaaatatcctgcagcttgctaacctgcctgatctatacaaagtctttgagaggtgttaa

SEQ ID NO: 281 - DNA, 121 bp, synthetic construct
  misc_feature 1..121: note = Description of artificial sequence: synthetic polynucleotide sequence
  source 1..121: mol_type = other DNA
cccagcaagatggtgctggcatgaagtctgtgcagggcccccagctgaggctctggttctgttccctttgcaggtcattactccctacactttgacgccttccaccaccctctgggtgata

SEQ ID NO: 282 - DNA, 121 bp, synthetic construct
  misc_feature 1..121: note = Description of artificial sequence: synthetic polynucleotide sequence
  source 1..121: mol_type = other DNA
cagccctccctgcccggaccctgcgcaaggtaatgtactgaagcggcagccccaccaggctgtgagatgagtcatctcgtctgctctagaaccacccttggggtctacaggaggaactgga

SEQ ID NO: 283 - DNA, 121 bp, synthetic construct
  misc_feature 1..121: note = Description of artificial sequence: synthetic polynucleotide sequence
  source 1..121: mol_type = other DNA
aaggcttgggtatgaacgtttggcccatatttctggaacctttccaacaagtaagctaccggagagtgcctccaatgcagaatccatcacaaccacacccttaatagctttttcaaggtcc

SEQ ID NO: 284 - DNA, 121 bp, synthetic construct
  misc_feature 1..121: note = Description of artificial sequence: synthetic polynucleotide sequence
  source 1..121: mol_type = other DNA
ggtgcaagctactatgcctggcttaacagtttcttaaaaagttaaaaatacacttcccataccacccagcaatccagctcctagaaagagaaatgaaagcatatgtccgcacaaagacttg

SEQ ID NO: 285 - DNA, 121 bp, synthetic construct
  misc_feature 1..121: note = Description of artificial sequence: synthetic polynucleotide sequence
  source 1..121: mol_type = other DNA
agaattaccgcttacctctgtatattcatcaaaagtatgatcttctgtctgaaaagtctctatattctcaactgcagtcccatcaaggagccaattatatttttcaactgaaaattaataa

SEQ ID NO: 286 - DNA, 158 bp, synthetic construct
  misc_feature 1..158: note = Description of artificial sequence: synthetic polynucleotide sequence
  source 1..158: mol_type = other DNA
ccatatgtctcataatgctttcttgcaccttctaagttccgatgtactgctgccttcagtgtatcaacagcccagtgtaacacgtgttcaggaagttctgtgtcaagatttactggtgttgaagttcctgatagccaagaggggattgtttggacatt

SEQ ID NO: 287 - DNA, 190 bp, synthetic construct
  misc_feature 1..190: note = Description of artificial sequence: synthetic polynucleotide sequence
  source 1..190: mol_type = other DNA
cctgcagagcttcggctattcgttccaccaaactcaagacattatcttccaaatcttgaaaggtaggataaaattccattttgtcgtcatcaaatgtcaattctatcttaaatattggcagcctttgttgatcttttgggtcaaagagttttacaaatccttctacagttctccttaatagatcctttag

SEQ ID NO: 288 - DNA, 197 bp, synthetic construct
  misc_feature 1..197: note = Description of artificial sequence: synthetic polynucleotide sequence
  source 1..197: mol_type = other DNA
cctgatttgacataagtgtggaaacacagctataaaatgcatccaatttttcaggtttaacaccttctagtgcctccttcttggtaaagagatttataacctttggataccatgtattcattatcttctcttctgcgtttctagtttgtattgatagatcagttttcagtgattcacagtcaattggacctttagct

SEQ ID NO: 289 - DNA, 160 bp, synthetic construct
  misc_feature 1..160: note = Description of artificial sequence: synthetic polynucleotide sequence
  source 1..160: mol_type = other DNA
cctaattcctgtgaagtccaacaaaactgtatcagcaaatgttgtataaccaaggtccagtaacattttcatagttggatgaataatgtgcaaattagagaatatttgatttcttgcctgcacatagctagaatgccaaggattagaataatctaggcct

SEQ ID NO: 290 - DNA, 121 bp, synthetic construct
  misc_feature 1..121: note = Description of artificial sequence: synthetic polynucleotide sequence
  source 1..121: mol_type = other DNA
ctgtttttaaaataatttactcacacaggagattcaggtaaaggacctccttcatcttcaagcgatttaactggtggtttcacaagaacgctctgcactaaaatacatggatatattaatg

SEQ ID NO: 291 - DNA, 191 bp, synthetic construct
  misc_feature 1..191: note = Description of artificial sequence: synthetic polynucleotide sequence
  source 1..191: mol_type = other DNA
cccaaatatctcttcatgctgttttcaaagtcacttgacacctcatttatgagactttcaagaagttcttctctttctttcccttcctttaaagactcaggtatcagccttaacatgtgatccagccattcctgctgaataggtactaaaggactactttctacacattgcttcatataaatatagttgaa

SEQ ID NO: 292 - DNA, 121 bp, synthetic construct
  misc_feature 1..121: note = Description of artificial sequence: synthetic polynucleotide sequence
  source 1..121: mol_type = other DNA
atttctttgaacattttcaaacaagaaatataaaaacttgaactcactcctttttttttcatttcactggtcatctgtcaaaaacaaacaggatataattaaatcaaggagaacattttaa

SEQ ID NO: 293 - DNA, 121 bp, synthetic construct
  misc_feature 1..121: note = Description of artificial sequence: synthetic polynucleotide sequence
  source 1..121: mol_type = other DNA
acgagaaaacataaacttacagtttgaggataatcaggtggtggtaatagaggtgttcttttacccagtgttctgtctaaatttcttttggctccatcaattctgaaatttatagttagaa

SEQ ID NO: 294 - DNA, 171 bp, synthetic construct
  misc_feature 1..171: note = Description of artificial sequence: synthetic polynucleotide sequence
  source 1..171: mol_type = other DNA
cactaactgattaattttctgctgctgctccttggatcttctgtattttagcagcttactttgtgttggtgtatcaacgcctatgttttctgggagatggacaatggggggtaacttcaagttcagagcttccttttctgctgcaatggcagctttgtttgcatctgacat

SEQ ID NO: 295 - DNA, 121 bp, synthetic construct
  misc_feature 1..121: note = Description of artificial sequence: synthetic polynucleotide sequence
  source 1..121: mol_type = other DNA
ctcaagtcatctgttggttactgcaacacatatgtactgtttaagggagattgtttcacggaaaggattggcttatatacagtctcgacaagcgctgaattctgtagttaaaattacatcc

SEQ ID NO: 296 - DNA, 121 bp, synthetic construct
  misc_feature 1..121: note = Description of artificial sequence: synthetic polynucleotide sequence
  source 1..121: mol_type = other DNA
acatcctgaactcattaccttcaagtatggaaatagcagtgcttcaggaatagaaatcttggcaatcgaaaggtaagattttccttaagataatattatctgaattcagatattatctgaa

SEQ ID NO: 297 - DNA, 121 bp, synthetic construct
  misc_feature 1..121: note = Description of artificial sequence: synthetic polynucleotide sequence
  source 1..121: mol_type = other DNA
gtcgttgaactgctcgatttggtcaaactttgctgggcagacggagcagacgtaagtggtcccctccgtgcaggccaccacgcctggggggccagcgcgggcacctgggggtgtgcctgca

SEQ ID NO: 298 - DNA, 121 bp, synthetic construct
  misc_feature 1..121: note = Description of artificial sequence: synthetic polynucleotide sequence
  source 1..121: mol_type = other DNA
gtcccattgctggcactgtgcagggccacgtgtcgctccaggagggtcttgtgagagaacttctttttgcagatgtagcactcgtaggacttctctccccggtggaggcgcatgtgcacgt

SEQ ID NO: 299 - DNA, 121 bp, synthetic construct
  misc_feature 1..121: note = Description of artificial sequence: synthetic polynucleotide sequence
  source 1..121: mol_type = other DNA
cttcctgtaatttttcaaggcttcagtctaattcttttactgatttgaaaagcagagcttaaataggttttaaagtattaaataagtcataatcactcaccaagttttactggactaggta

SEQ ID NO: 300 - DNA, 121 bp, synthetic construct
  misc_feature 1..121: note = Description of artificial sequence: synthetic polynucleotide sequence
  source 1..121: mol_type = other DNA
tcagtaggaaaaggaatggcttgcagacagaagcttttagttgagaagatgaacattcatgttgagaagtggctttcaagttcctacagaagaggtccacatgtccgtgttcagagaaagg

SEQ ID NO: 301 - DNA, 121 bp, synthetic construct
  misc_feature 1..121: note = Description of artificial sequence: synthetic polynucleotide sequence
  source 1..121: mol_type = other DNA
cagtgactcctgaagtttctcaggtttgggaagtacacaacacttaccttcaatggtacactgatcagggactggaatcttctttccaatttccatggcatatgctttcactttgctgagg

SEQ ID NO: 302 - DNA, 121 bp, synthetic construct
  misc_feature 1..121: note = Description of artificial sequence: synthetic polynucleotide sequence
  source 1..121: mol_type = other DNA
taagtgcaagtagagcttatcttggtattctataggacttgcagttgtctctggagtttcttcctgggagttttctttaacagtttctgacaaattctctgagtctatatgtataatattt

SEQ ID NO: 303 - DNA, 121 bp, synthetic construct
  misc_feature 1..121: note = Description of artificial sequence: synthetic polynucleotide sequence
  source 1..121: mol_type = other DNA
ggctatgtacacattcatagtcggtccatggcttccaactagtagcgctatttccgaaggtctaatacacaaacctgtaagaaattaaaataatcaaccagtgtattcagaattttattgt

SEQ ID NO: 304 - DNA, 121 bp, synthetic construct
  misc_feature 1..121: note = Description of artificial sequence: synthetic polynucleotide sequence
  source 1..121: mol_type = other DNA
ctatacttactgaaccatctgatgcactggctccaactttgtctcctgctgcattccagcaaacttcaaatattccacctgttcccctatagctgtgaactagagcacctgtctaaaagaa

SEQ ID NO: 305 - DNA, 167 bp, synthetic construct
  misc_feature 1..167: note = Description of artificial sequence: synthetic polynucleotide sequence
  source 1..167: mol_type = other DNA
cctgcgtgttccagatgtgtacacatttgtcaaaagaaccacttgccagatacctgccatcaggactgaaagctacactgtacacaggctcttggtgttttgtcaaggtatggatgcatatccctcggtctacatcccataacctaacagtagaatcaaaggatgca

SEQ ID NO: 306 - DNA, 121 bp, synthetic construct
  misc_feature 1..121: note = Description of artificial sequence: synthetic polynucleotide sequence
  source 1..121: mol_type = other DNA
gctaacataaggttggcatttggattattagtccctggtcctgttggactccatttgatagtataaatttctttattatgtgcttgcaaatcatggacacaattgtcttgtttcatactcc

SEQ ID NO: 307 - DNA, 121 bp, synthetic construct
  misc_feature 1..121: note = Description of artificial sequence: synthetic polynucleotide sequence
  source 1..121: mol_type = other DNA
tttctccctactaagcaaattacctttaaagtcatgtcgtcagaacaggaggccaagagattgccagttgggtcccatttgatagcatttacttcattctaaaaataatagtaaatattca

SEQ ID NO: 308 - DNA, 121 bp, synthetic construct
  misc_feature 1..121: note = Description of artificial sequence: synthetic polynucleotide sequence
  source 1..121: mol_type = other DNA
cgtatgtccttggaatgttttaataggtctgtcttgtcctaatttacagacatgaatgcacatatctgtactacaagaagcaaaggtgttgttgctctgccaatcaacatccaatgctggt

SEQ ID NO: 309 - DNA, 121 bp, synthetic construct
  misc_feature 1..121: note = Description of artificial sequence: synthetic polynucleotide sequence
  source 1..121: mol_type = other DNA
cagctttcacgtaaattataagaaatttacctgaatgaaaaggaaactgttgcttggcttcaccagtatgtgcgtcccaaataattgtagtctgagattaaaaggaaaagaaaaataaact

SEQ ID NO: 310 - DNA, 121 bp, synthetic construct
  misc_feature 1..121: note = Description of artificial sequence: synthetic polynucleotide sequence
  source 1..121: mol_type = other DNA
atgagcttttaccttgtctactccagcacttaggatgaaatttcctttcttattccattttaatgcaaatatagggcctttatgctgccctaaggtgctagcaaggttacctaaaatgcaa

SEQ ID NO: 311 - DNA, 121 bp, synthetic construct
  misc_feature 1..121: note = Description of artificial sequence: synthetic polynucleotide sequence
  source 1..121: mol_type = other DNA
caaagtaagaaggaaaatgcttcatttaccatctttagtccatattctggcaaacccatcataggaaccagttgctagaagtgtaccttcactctgccagagaaaaacatttctttaatta

SEQ ID NO: 312 - DNA, 143 bp, synthetic construct
  misc_feature 1..143: note = Description of artificial sequence: synthetic polynucleotide sequence
  source 1..143: mol_type = other DNA
cattccaatctagagatgtgacatccttgttgcttggaacatcttgccctccttctcgtatacaatgtctaagtactaactgtgtagagccactggtgctgttctcactaagattccatattcttgctgttgagtctccagac

SEQ ID NO: 313 - DNA, 134 bp, synthetic construct
  misc_feature 1..134: note = Description of artificial sequence: synthetic polynucleotide sequence
  source 1..134: mol_type = other DNA
ccctgatgctaggagatcactaacagggttccaggcacagataaaaacttcagattcatggccccgcaacacaacagctttattaggagggatttcaacatccccatccacttccatcatatcagtatgattat

SEQ ID NO: 314 - DNA, 224 bp, synthetic construct
  misc_feature 1..224: note = Description of artificial sequence: synthetic polynucleotide sequence
  source 1..224: mol_type = other DNA
cttgctatagtatgtgctccattctcctccccatttgctgtgttttctccattttttgcagatccttgttggctggctgcagctgcggcagctgcagcagctgctgcctgttgctgtgcaagcttatctctataagcttgttgtcttgtttgtactacatcaggcattacggcatctatcagggacagagactctattggtcgaccatcaaacaaggtaccatc

SEQ ID NO: 315 - DNA, 147 bp, synthetic construct
  misc_feature 1..147: note = Description of artificial sequence: synthetic polynucleotide sequence
  source 1..147: mol_type = other DNA
cctcattaatactaacttctgcttctacatactgtagacctttctggatgatagaaatcaatgcagcgggtgggacgagggcaccatttatattggactgactgatatggctttctataccaaaggtaaatgctgaatgagaaaatc

SEQ ID NO: 316 - DNA, 121 bp, synthetic construct
  misc_feature 1..121: note = Description of artificial sequence: synthetic polynucleotide sequence
  source 1..121: mol_type = other DNA
ttgaggcctatttactttataaaagtactcacctgactcttgcaagtatctatataccaagaagttgacctcatcactgcttatactcatctttattcccacttaaaccatgaggtcacaa

SEQ ID NO: 317 - DNA, 145 bp, synthetic construct
  misc_feature 1..145: note = Description of artificial sequence: synthetic polynucleotide sequence
  source 1..145: mol_type = other DNA
ttcagcaggctttggggagctccggaggcaggtcagtggctgacacgcggtattgcaccttggtgttggtgatggcgccatgcttctggcgcaagtgaagtcgcagctggcttttgtgacggaaatgcaggttacacttctcaca

SEQ ID NO: 318 - DNA, 139 bp, synthetic construct
  misc_feature 1..139: note = Description of artificial sequence: synthetic polynucleotide sequence
  source 1..139: mol_type = other DNA
catggtaaggtttctctcctgtgtggattcgcaggtggctcttcagagtctgaaggtgccggaaacgggtgccacagatttcacagggatagggcttctcaccagtgtggataagcacatgggcacggaggtgggccac

SEQ ID NO: 319 - DNA, 121 bp, synthetic construct
  misc_feature 1..121: note = Description of artificial sequence: synthetic polynucleotide sequence
  source 1..121: mol_type = other DNA
caaatctggctccgcaggtttcgcatttgtagggcttctctccagagtgaattcgagtgtgggttttcaggttggctggccggttgaactgggccccacagatgttgcaacgatagggttt

SEQ ID NO: 320 - DNA, 169 bp, synthetic construct
  misc_feature 1..169: note = Description of artificial sequence: synthetic polynucleotide sequence
  source 1..169: mol_type = other DNA
ccggtatggacggtcttgtggctggcgaggttgcccttgtagcggaaggaggcctggcagcggtcacacttgtagggtttgtcactgtgggtctgcagcgtgtgcctcttgagtgaggcctcctcagagaagcggcagtcacactcattgcagaagaaggccccgttct

SEQ ID NO: 321 - DNA, 186 bp, synthetic construct
  misc_feature 1..186: note = Description of artificial sequence: synthetic polynucleotide sequence
  source 1..186: mol_type = other DNA
ccacagctagaatctgagtactcagactgggtctctcccatctcctcagggaacgtggggccagcggtgtggaggcacatctctgcatgctgtggggactgagagccgcaggacgtgcacttcggggggtgcatgtagagtggtgagtggctctcgctgctgctgcggggagagcccgtcatggac

SEQ ID NO: 322 - DNA, 121 bp, synthetic construct
  misc_feature 1..121: note = Description of artificial sequence: synthetic polynucleotide sequence
  source 1..121: mol_type = other DNA
cctgttaacgatgttattgagccggctggcttgtgggatggtggagtcctccccgctggcactcagcttggttggggactggaggtcaaggttctcaggctccatgggtggctggcaggca

SEQ ID NO: 323 - DNA, 121 bp, synthetic construct
  misc_feature 1..121: note = Description of artificial sequence: synthetic polynucleotide sequence
  source 1..121: mol_type = other DNA
gtggggccgtgtaggctcgtggggaaaggcggcccagctcagcctgctcaggcccctctggtttggcattctggttgaggctgttgagcacgatgaacttgtatttcttccagttgcaggc

SEQ ID NO: 324 - DNA, 121 bp, synthetic construct
  misc_feature 1..121: note = Description of artificial sequence: synthetic polynucleotide sequence
  source 1..121: mol_type = other DNA
tggggtcagtggggctcttggctggaggggagccagaagcctggaggatgcaggcattcttactgctgcaggactctgtgggcgagttgggctggcagtcagatttctgggggctctgtgg

SEQ ID NO: 325 - DNA, 121 bp, synthetic construct
  misc_feature 1..121: note = Description of artificial sequence: synthetic polynucleotide sequence
  source 1..121: mol_type = other DNA
actaaccagacccttccggttcaggggtgcattggggggctcgaaatgcagggcaatctcatcttccgaggagggtctctcttcttctttgctggccttgtcacaagggaagtagggggca

SEQ ID NO: 326 - DNA, 121 bp, synthetic construct
  misc_feature 1..121: note = Description of artificial sequence: synthetic polynucleotide sequence
  source 1..121: mol_type = other DNA
ttcgggctgagggggcagcaggtttgaggccctcagccacactgtagtgcatatcacttcgtgcctcttctgggattgtttccttgggtgaatagatattgctgtggcacacattggggga

SEQ ID NO: 327 - DNA, 121 bp, synthetic construct
  misc_feature 1..121: note = Description of artificial sequence: synthetic polynucleotide sequence
  source 1..121: mol_type = other DNA
cacctccaaagtcggccggctgtactcaccagggactggcctggcactatcacatgggagtgcccgctccttggggaaggggttggccacaggcatccggacatcccgaaactcctcatcg

SEQ ID NO: 328 - DNA, 121 bp, synthetic construct
  misc_feature 1..121: note = Description of artificial sequence: synthetic polynucleotide sequence
  source 1..121: mol_type = other DNA
agaagaggaggctgctgacagggaggtggctgtacatggaataagaggctggcggtgtggacaggccactgtacaggctgggggcaaaggctctgctctcacacccaggggcgctcctcag

SEQ ID NO: 329 - DNA, 121 bp, synthetic construct
  misc_feature 1..121: note = Description of artificial sequence: synthetic polynucleotide sequence
  source 1..121: mol_type = other DNA
tggcaggttgttctccaccacctcacgaccccgataggccatgatgtcttggggcatcagcatccggctgttgaggaactcttcacgaggaggcttgatggcagaaaccatctctgcttca

SEQ ID NO: 330 - DNA, 223 bp, synthetic construct
  misc_feature 1..223: note = Description of artificial sequence: synthetic polynucleotide sequence
  source 1..223: mol_type = other DNA
cctggccttaataaacttccggcaagtgtccacaacatgctccatctgcaggtacatagccgtggccatcacagccatgatgttgccctcccgcaaattgagccgagatgtgtacatgaagtccaggaggatgcagaatccctcagggttgatctcaggatctagattgatcacactaaggttgcatttcaactggtctgtaaagatgctatagaacaggcca

SEQ ID NO: 331 - DNA, 162 bp, synthetic construct
  misc_feature 1..162: note = Description of artificial sequence: synthetic polynucleotide sequence
  source 1..162: mol_type = other DNA
cctgcaggccatgaggaccgttttatgggctctaaactgctcacggctcacaacaatgacaacatcagtcaagatgtctcgactccggagacgattaaggttgagaagaacatcactggcatggcgggtgaactggatacagctgtcagccggcgaggccat

SEQ ID NO: 332 - DNA, 121 bp, synthetic construct
  misc_feature 1..121: note = Description of artificial sequence: synthetic polynucleotide sequence
  source 1..121: mol_type = other DNA
ttcctttgtgtggcctaagaaatgccaggtggacataaacctcctttattttgctgtttaaactaggtttgcgcctgtcaagtgcgagccacaggaaaaatgtatgcctgcaaaaagctac

SEQ ID NO: 333 - DNA, 121 bp, synthetic construct
  misc_feature 1..121: note = Description of artificial sequence: synthetic polynucleotide sequence
  source 1..121: mol_type = other DNA
agaataaagaagaggaaaggtgaagctatggctctaaatgagaaaagaattctggagaaagtgcaaagtagattcgtagtaagtgtctcctcttagtcttcactgtgcattgtttgattca

SEQ ID NO: 334 - DNA, 121 bp, synthetic construct
  misc_feature 1..121: note = Description of artificial sequence: synthetic polynucleotide sequence
  source 1..121: mol_type = other DNA
agatttggtgaaggaatgtgttatgtcgattccatgacgagttctaattacctcattaatgttgagatgttcactgatattgaagctgttctgcaggtgaagagtgccgtaagtgcctcta

SEQ ID NO: 335 - DNA, 121 bp, synthetic construct
  misc_feature 1..121: note = Description of artificial sequence: synthetic polynucleotide sequence
  source 1..121: mol_type = other DNA
tgcagtcactgtgggaatgaacagagaaattaggacctagaaaagctgttgcagctacctctgtccaccactgaagatgaggagaaaggctcactgtttctccttgtttaatctgtgaaca

SEQ ID NO: 336 - DNA, 148 bp, synthetic construct
  misc_feature 1..148: note = Description of artificial sequence: synthetic polynucleotide sequence
  source 1..148: mol_type = other DNA
agagtgtcacccaacctgcaggcagtgtcatgggccgttggagtctgactgcatctcctgttaccctcacatctctcttaccaatggtaactgcaggaccagctgcagggaagagcagttcctcaacctcgtgggatactgtgctggt

SEQ ID NO: 337 - DNA, 121 bp, synthetic construct
  misc_feature 1..121: note = Description of artificial sequence: synthetic polynucleotide sequence
  source 1..121: mol_type = other DNA
agatttagaatataaaggaacagttaaatttgcagataatgaaataatatagctttaaacagcaactttaccttcaaaaaggaccacacatttttctcaaattcagtctgagaagcatcaa

SEQ ID NO: 338 - DNA, 121 bp, synthetic construct
  misc_feature 1..121: note = Description of artificial sequence: synthetic polynucleotide sequence
  source 1..121: mol_type = other DNA
tggcaataattgataaatccttgtgactgcacagcctgctgaagttggtctgatcggctgaggaactccttttctgttacaacctgactaatgaacacatggtgctgctgctgctgctgct

SEQ ID NO: 339 - DNA, 266 bp, synthetic construct
  misc_feature 1..266: note = Description of artificial sequence: synthetic polynucleotide sequence
  source 1..266: mol_type = other DNA
agattaagaatggcaaagtatattttacatccgatgcaggaattgctgggaaagtggagagaaatattcctgaagtatatgttgcagacggccactggcacacttttctaattgggaaaaatggaacagcaacagtattgtctgttgacagaatatataacagagatattatccaccctactcaggacttcggtggccttgatgtgcttactatatcacttggaggaattccacccaatcaagcacatcgagatgcccaaacaggt

SEQ ID NO: 340 - DNA, 121 bp, synthetic construct
  misc_feature 1..121: note = Description of artificial sequence: synthetic polynucleotide sequence
  source 1..121: mol_type = other DNA
gcagttaatcctctttcttccatagaatctgctttcagatgaaagactgtgtcagagtgaagcactttatgccttcttgagcccttctcctgactacctcaaggttatcgacgtgcagggg

SEQ ID NO: 341 - DNA, 121 bp, synthetic construct
  misc_feature 1..121: note = Description of artificial sequence: synthetic polynucleotide sequence
  source 1..121: mol_type = other DNA
attctttttcattatcctcatttttggaaagacttcctcgcgacttcttctcccaccaggaggtgagccgttgaaagagtgaaccacttttgtagtgtatttcagcagatactaagctcat

SEQ ID NO: 342 - DNA, 238 bp, synthetic construct
  misc_feature 1..238: note = Description of artificial sequence: synthetic polynucleotide sequence
  source 1..238: mol_type = other DNA
catgtctcgccggaagcctgcgtcgggcggcctcgctgcctccagctcagcccctgcgaggcaagcggttttgagccgattcttccagtctacgggaagcctgaaatccacctcctcctccacaggtgcagccgaccaggtggaccctggcgctgcagcggctgcagcggccgcagcggccgcagcgcccccagcgcccccagctcccgccttcccgccccagctgccgccgcacata

SEQ ID NO: 343 - DNA, 121 bp, synthetic construct
  misc_feature 1..121: note = Description of artificial sequence: synthetic polynucleotide sequence
  source 1..121: mol_type = other DNA
gctacagaaattgacagaagaaagaagagaccattggaaaatgatgggcctgttaaaaagaaagtaaagaaagtccaacaaaaggaaggaggaagtgatctgggaatgtctggcaactctg

SEQ ID NO: 344 - DNA, 222 bp, synthetic construct
  misc_feature 1..222: note = Description of artificial sequence: synthetic polynucleotide sequence
  source 1..222: mol_type = other DNA
gagccaaagaaatgtctgaggaccaggaatgtttcaaagtctctggaaaaattgaaagaattctgctgcgattctgcccttcctcaaagtagagtccagacagaatctctgcaggagagatttgcagttctgccaaaatgtactgattttgatgatatcagtcttctacacgcaaagaatgcagtttcttctgaagattcgaaacgtcaaattaatcaaaag

SEQ ID NO: 345 - DNA, 214 bp, synthetic construct
  misc_feature 1..214: note = Description of artificial sequence: synthetic polynucleotide sequence
  source 1..214: mol_type = other DNA
ggacacaacactttttgatctcagtcagtttggatcatcaaatacaagtcatgaaaatttacagaaaactgcttccaaatcagctaacaaacggtccaaaagcatctatacgccgctagaattacaatacatagaaatgaagcagcagcacaaagatgcagttttgtgtgtggaatgtggatataagtatagattctttggggaagatgcagag

SEQ ID NO: 346 - DNA, 121 bp, synthetic construct
  misc_feature 1..121: note = Description of artificial sequence: synthetic polynucleotide sequence
  source 1..121: mol_type = other DNA
agattgcagcccgagagctcaatatttattgccatttagatcacaactttatgacagcaagtatacctactcacagactgtttgttcatgtacgccgcctggtggcaaaaggatataaggt

SEQ ID NO: 347 - DNA, 121 bp, synthetic construct
  misc_feature 1..121: note = Description of artificial sequence: synthetic polynucleotide sequence
  source 1..121: mol_type = other DNA
aggtgggagttgtgaagcaaactgaaactgcagcattaaaggccattggagacaacagaagttcactcttttcccggaaattgactgccctttatacaaaatctacacttattggagaaga

SEQ ID NO: 348 - DNA, 249 bp, synthetic construct
  misc_feature 1..249: note = Description of artificial sequence: synthetic polynucleotide sequence
  source 1..249: mol_type = other DNA
attattaaatgtgaatcccctaatcaagctggatgatgctgtaaatgttgatgagataatgactgatacttctaccagctatcttctgtgcatctctgaaaataaggaaaatgttagggacaaaaaaaagggcaacatttttattggcattgtggtaagtactttgcaggtgaggaacaaatgttagatgttcatggtatctctaaatatgatctatcatgtatggtttataataaggatatctgatga

SEQ ID NO: 349 - DNA, 168 bp, synthetic construct
  misc_feature 1..168: note = Description of artificial sequence: synthetic polynucleotide sequence
  source 1..168: mol_type = other DNA
gggagtgcagcctgccacaggcgaggttgtgtttgatagtttccaggactctgcttctcgttcagagctagaaacccggatgtcaagcctgcagccagtagagctgctgcttccttcggccttgtccgagcaaacagaggcgctcatccacagagccacatctgttag

SEQ ID NO: 350 - DNA, 121 bp, synthetic construct
  misc_feature 1..121: note = Description of artificial sequence: synthetic polynucleotide sequence
  source 1..121: mol_type = other DNA
tcagtgtgcaggatgacagaattcgagtcgaaaggatggataacatttattttgaatacagccatgctttccaggcagttacagagttttatgcaaaagatacagttgacatcaaaggtaa

SEQ ID NO: 351 - DNA, 121 bp, synthetic construct
  misc_feature 1..121: note = Description of artificial sequence: synthetic polynucleotide sequence
  source 1..121: mol_type = other DNA
taggttctcaaattatttctggcattgttaacttagagaagcctgtgatttgctctttggctgccatcataaaatacctcaaagaattcaacttggaaaagatgctctccaaacctgagta

SEQ ID NO: 352 - DNA, 121 bp, synthetic construct
  misc_feature 1..121: note = Description of artificial sequence: synthetic polynucleotide sequence
  source 1..121: mol_type = other DNA
tatttgattcttttacaggaattttaaacagctatcaagtaaaatggaatttatgacaattaatggaacaacattaaggaatctggaaatcctacagaatcaggtcaggcaaatacaaggg

SEQ ID NO: 353 - DNA, 121 bp, synthetic construct
  misc_feature 1..121: note = Description of artificial sequence: synthetic polynucleotide sequence
  source 1..121: mol_type = other DNA
tcttagactgatatgaaaaccaaaggaagtttgctgtgggttttagaccacactaaaacttcatttgggagacggaagttaaagaagtgggtgacccagccactccttaaattaaggtaaa

SEQ ID NO: 354 - DNA, 134 bp, synthetic construct
  misc_feature 1..134: note = Description of artificial sequence: synthetic polynucleotide sequence
  source 1..134: mol_type = other DNA
gggaaataaatgcccggcttgatgctgtatcggaagttctccattcagaatctagtgtgtttggtcagatagaaaatcatctacgtaaattgcccgacatagagaggggactctgtagcatttatcacaaaaaa

SEQ ID NO: 355 - DNA, 189 bp, synthetic construct
  misc_feature 1..189: note = Description of artificial sequence: synthetic polynucleotide sequence
  source 1..189: mol_type = other DNA
gtgttctacccaagagttcttcttgattgtcaaaactttatatcacctaaagtcagaatttcaagcaataatacctgctgttaattcccacattcagtcagacttgctccggaccgttattttagaaattcctgaactcctcagtccagtggagcattacttaaagatactcaatgaacaagctgccaa

SEQ ID NO: 356 - DNA, 170 bp, synthetic construct
  misc_feature 1..170: note = Description of artificial sequence: synthetic polynucleotide sequence
  source 1..170: mol_type = other DNA
gagttggggataaaactgaattatttaaagacctttctgacttccctttaataaaaaagaggaaggatgaaattcaaggtgttattgacgagatccgaatgcatttgcaagaaatacgaaaaatactaaaaaatccttctgcacaatatgtgacagtatcaggacaggag

SEQ ID NO: 357 - DNA, 121 bp, synthetic construct
  misc_feature 1..121: note = Description of artificial sequence: synthetic polynucleotide sequence
  source 1..121: mol_type = other DNA
aatctctgtttatttgtatttgttttagtttatgatagaaataaagaactctgctgtatcttgtataccaactgattgggtaaaggttggaaggtaggtttaaaataaatttttttcttac

SEQ ID NO: 358 - DNA, 121 bp, synthetic construct
  misc_feature 1..121: note = Description of artificial sequence: synthetic polynucleotide sequence
  source 1..121: mol_type = other DNA
agcacaaaagctgtgagccgctttcactctccttttattgtagaaaattacagacatctgaatcagctccgggagcagctagtccttgactgcagtgctgaatggcttgattttctagagt

SEQ ID NO: 359 - DNA, 121 bp, synthetic construct
  misc_feature 1..121: note = Description of artificial sequence: synthetic polynucleotide sequence
  source 1..121: mol_type = other DNA
tccgtaggaaattcagtgaacattatcactccttgtgtaaagcagtgcatcacctagcaactgttgactgcattttctccctggccaaggtcgctaagcaaggagattactgcaggtaaga

SEQ ID NO: 360 - DNA, 121 bp, synthetic construct
  misc_feature 1..121: note = Description of artificial sequence: synthetic polynucleotide sequence
  source 1..121: mol_type = other DNA
tgcagaccaactgtacaagaagaaagaaaaattgtaataaaaaatggaaggcaccctgtgattgatgtgttgctgggagaacaggatcaatatgtcccaaataatacagatttatcagtaa

SEQ ID NO: 361 - DNA, 159 bp, synthetic construct
  misc_feature 1..159: note = Description of artificial sequence: synthetic polynucleotide sequence
  source 1..159: mol_type = other DNA
ggaggactcagagagagtaatgataattaccggaccaaacatgggtggaaagagctcctacataaaacaagttgcattgattaccatcatggctcagattggctcctatgttcctgcagaagaagcgacaattgggattgtggatggcattttcacaag

SEQ ID NO: 362 - DNA, 188 bp, synthetic construct
  misc_feature 1..188: note = Description of artificial sequence: synthetic polynucleotide sequence
  source 1..188: mol_type = other DNA
ggatgggtgctgcagacaatatatataaaggacagagtacatttatggaagaactgactgacacagcagaaataatcagaaaagcaacatcacagtccttggttatcttggatgaactaggaagagggacgagcactcatgatggaattgccattgcctatgctacacttgagtatttcatcagagat

SEQ ID NO: 363 - DNA, 121 bp, synthetic construct
  misc_feature 1..121: note = Description of artificial sequence: synthetic polynucleotide sequence
  source 1..121: mol_type = other DNA
aatccttaaccctgtttgtcacccattatccgccagtttgtgaactagaaaaaaattactcacaccaggtggggaattaccacatgggattcttggtcagtgaggatgaaagcaaactgga

SEQ ID NO: 364 - DNA, 173 bp, synthetic construct
  misc_feature 1..173: note = Description of artificial sequence: synthetic polynucleotide sequence
  source 1..173: mol_type = other DNA
ggcgcagcagaacaagtccctgattttgtcaccttcctttaccaaataactagaggaattgcagcaaggagttatggattaaatgtggctaaactagcagatgttcctggagaaattttgaagaaagcagctcacaagtcaaaagagctggaaggattaataaatacgaaaag

SEQ ID NO: 365 - DNA, 121 bp, synthetic construct
  misc_feature 1..121: note = Description of artificial sequence: synthetic polynucleotide sequence
  source 1..121: mol_type = other DNA
cccagaaagagactcaagtattttgcaaagttatggacgatgcataatgcacaagacctgcagaagtggacagaggagttcaacatggaagaaacacagacttctcttcttcattaaaatg

SEQ ID NO: 366 - DNA, 207 bp, synthetic construct
  misc_feature 1..207: note = Description of artificial sequence: synthetic polynucleotide sequence
  source 1..207: mol_type = other DNA
agaaaacaccaccactcttcagttacaaatagctcgagataaaggactacttggggatattgccattcacttgagagctcaacccaatttcttactgcatgtcgataatcaagctactgagaatgaagattatgtattgcaagaaacaataataataatgaaagaaaacataaaagaagctcatgccgaagtttccattttgccggt

SEQ ID NO: 367 - DNA, 121 bp, synthetic construct
  misc_feature 1..121: note = Description of artificial sequence: synthetic polynucleotide sequence
  source 1..121: mol_type = other DNA
agattctgtttctggcgtctgcatacgcaagtccccaactcgctgaggagagctgttcagctatggctgctgtcacacattacctgtatctttgccagtttagctggatgctcattcaggt

SEQ ID NO: 368 - DNA, 121 bp, synthetic construct
  misc_feature 1..121: note = Description of artificial sequence: synthetic polynucleotide sequence
  source 1..121: mol_type = other DNA
catgttgccccgtttgtcagagagtttttcagacagaggctgagttacaagaagtcatcagtgatttgcagtctaaactgcgacttgctccagataaactcaagtcaacagaatcagagct

SEQ ID NO: 369 - DNA, 121 bp, synthetic construct
  misc_feature 1..121: note = Description of artificial sequence: synthetic polynucleotide sequence
  source 1..121: mol_type = other DNA
aggaaaagcggcgtgatgaaatgctgggacttgtgcccatgaggtaagaatgggatttaccttcactgtacatgtagcagcacattgtaaaaggtacccatctcatgcctgggcagatggt

SEQ ID NO: 370 - DNA, 121 bp, synthetic construct
  misc_feature 1..121: note = Description of artificial sequence: synthetic polynucleotide sequence
  source 1..121: mol_type = other DNA
cttatttttaagaaataaatttattttacttgtagttacttaaaccctagaaataattttttcaaacagtagaagtacagccttttataataagatagttcatgatttgttctttcgagga

SEQ ID NO: 371 - DNA, 121 bp, synthetic construct
  misc_feature 1..121: note = Description of artificial sequence: synthetic polynucleotide sequence
  source 1..121: mol_type = other DNA
taataaggttcttctacaattggatggtgacaaagtttgggtttgttaggattatttttcagcagccaatcagctagccaaatctatgggaaaaaaaaaaacaacctaagttaagaaacag

SEQ ID NO: 372 - DNA, 121 bp, synthetic construct
  misc_feature 1..121: note = Description of artificial sequence: synthetic polynucleotide sequence
  source 1..121: mol_type = other DNA
ggaggagctggccctctcccactgtggccgcttcctggccagtagtggccatgaccagcgcctcaagttttgggacatggcccagctgcgagctgtggtggtggatgactaccgtcggcgc

SEQ ID NO: 373 - DNA, 121 bp, synthetic construct
  misc_feature 1..121: note = Description of artificial sequence: synthetic polynucleotide sequence
  source 1..121: mol_type = other DNA
agggaggaccactgcgggctctgagcagcaagacttggagcaccgatgacttcttcgcaggactgagggaagagggagaagactccatggctcaggaagaaaaggaggagactggggatga

SEQ ID NO: 374 - DNA, 324 bp, synthetic construct
  misc_feature 1..324: note = Description of artificial sequence: synthetic polynucleotide sequence
  source 1..324: mol_type = other DNA
catgtccgagactgcgcctgccgcgcccgctgctccggcccctgccgagaagactcccgtgaagaagaaggcccgcaagtctgcaggtgcggccaagcgcaaagcgtctgggcccccggtgtccgagctcattactaaagctgttgccgcctccaaggagcgcagcggcgtatctttggccgctctcaagaaagcgctggcagccgctggctatgacgtggagaagaacaacagccgcatcaagctgggtctcaagagcctggtgagcaagggcaccctggtgcagaccaagggcaccggcgcgtcgggttccttcaaactcaa

SEQ ID NO: 375 - DNA, 337 bp, synthetic construct
  misc_feature 1..337: note = Description of artificial sequence: synthetic polynucleotide sequence
  source 1..337: mol_type = other DNA
caagaaggcggcctctggggaagccaagcctaaggctaaaaaggcaggcgcggccaaggccaagaagccagcaggagcggcgaagaagcccaagaaggcgacgggggcggccacccccaagaagagcgccaagaagaccccaaagaaggcgaagaagccggctgcagctgctggagccaaaaaagcgaaaagcccgaaaaaggcgaaagcagccaagccaaaaaaggcgcccaagagcccagcgaaggccaaagcagttaaacccaaggcggctaaaccaaagaccgccaagcccaaggcagccaagccaaagaaggcggcagccaagaaaaagtag

SEQ ID NO: 376 - DNA, 394 bp, synthetic construct
  misc_feature 1..394: note = Description of artificial sequence: synthetic polynucleotide sequence
  source 1..394: mol_type = other DNA
tttacttgcccttggccttgtggtgactctcagtcttcttggggagcagtacagcctggatgttgggcagaacaccgccctgagcaattgtgactttacccagcaacttgtttagctcctcgtcgttgcggatggccagctgcaggtgtcgggggatgatgcgggtcttcttgttgtcgcgggcggcgttgcccgccagctccaggatctcggcggtcaggtactccaacaccgccgccagatacactggcgcgccggccccgactcgctcggagtagttgcccttgcggagcaagcggtgtacgcggcccacagggaactggagtccggcccgcgaagagcgggtcttagccttagctcgggcctttccgccttgcttgccgcgtccggacat

SEQ ID NO: 377 - DNA, 121 bp, synthetic construct
  misc_feature 1..121: note = Description of artificial sequence: synthetic polynucleotide sequence
  source 1..121: mol_type = other DNA
ggcgccccgaagcctcctcctgctgctctcaggggccctggccctgaccgatacttgggcgggtgagtgcggggtccagagagaaacggcctctgtggggaggagtgaggggcccgcccgg

SEQ ID NO: 378 - DNA, 121 bp, synthetic construct
  misc_feature 1..121: note = Description of artificial sequence: synthetic polynucleotide sequence
  source 1..121: mol_type = other DNA
tggcctggttgtccttgcagctgtagtcactggagctgcggtcgctgctgtgctgtggagaaagaagagctcaggtaaggaaggggtgacaagtggggtctgagttttcttgtcccactgg

SEQ ID NO: 379 - DNA, 121 bp, synthetic construct
  misc_feature 1..121: note = Description of artificial sequence: synthetic polynucleotide sequence
  source 1..121: mol_type = other DNA
tcagattctccccagacgccgaggatggccgtcatggcgccccgaaccctcctcctgctactctcgggggccctggccctgacccagacctgggcgggtgagtgcggggtcgggagggaaa

SEQ ID NO: 380 - DNA, 271 bp, synthetic construct
  misc_feature 1..271: note = Description of artificial sequence: synthetic polynucleotide sequence
  source 1..271: mol_type = other DNA
ggctcccactccatgaggtatttcttcacatccgtgtcccggcccggccgcggggagccccgcttcatcgccgtgggctacgtggacgacacgcagttcgtgcggttcgacagcgacgccgcgagccagaggatggagccgcgggcgccgtggatagagcaggaggggccggagtattgggaccaggagacacggaatgtgaaggcccagtcacagactgaccgagtggacctggggaccctgcgcggctactacaaccagagcgaggccg

SEQ ID NO: 381 - DNA, 277 bp, synthetic construct
  misc_feature 1..277: note = Description of artificial sequence: synthetic polynucleotide sequence
  source 1..277: mol_type = other DNA
ggttctcacaccatccagataatgtatggctgcgacgtggggtcggacgggcgcttcctccgcgggtaccggcaggacgcctacgacggcaaggattacatcgccctgaacgaggacctgcgctcttggaccgcggcggacatggcggctcagatcaccaagcgcaagtgggaggcggcccatgaggcggagcagttgagagcctacctggatggcacgtgcgtggagtggctccgcagatacctggagaacgggaaggagacgctgcagcgcacgg

SEQ ID NO: 382 - DNA, 277 bp, synthetic construct
  misc_feature 1..277: note = Description of artificial sequence: synthetic polynucleotide sequence
  source 1..277: mol_type = other DNA
gacccccccaagacacatatgacccaccaccccatctctgaccatgaggccaccctgaggtgctgggccctgggcttctaccctgcggagatcacactgacctggcagcgggatggggaggaccagacccaggacacggagctcgtggagaccaggcctgcaggggatggaaccttccagaagtgggcggctgtggtggtgccttctggagaggagcagagatacacctgccatgtgcagcatgagggtctgcccaagcccctcaccctgagatggg

SEQ ID NO: 383 - DNA, 121 bp, synthetic construct
  misc_feature 1..121: note = Description of artificial sequence: synthetic polynucleotide sequence
  source 1..121: mol_type = other DNA
agagctgtcttcccagcccaccatccccatcgtgggcatcattgctggcctggttctccttggagctgtgatcactggagctgtggtcgctgccgtgatgtggaggaggaagagctcaggt

SEQ ID NO: 384 - DNA, 121 bp, synthetic construct
  misc_feature 1..121: note = Description of artificial sequence: synthetic polynucleotide sequence
  source 1..121: mol_type = other DNA
cctggctcctttctggtatctcacaggacattttcttctcacagatagaaaaggagggagttacactcaggctgcaagtaagtatgaaggaggctgatgcctgaggtccttgggatattgt

SEQ ID NO: 385 - DNA, 121 bp, synthetic construct
  misc_feature 1..121: note = Description of artificial sequence: synthetic polynucleotide sequence
  source 1..121: mol_type = other DNA
tgggatctgaccaggttctgtttttgttctaccccaggcagtgacagtgcccagggctctgatgtgtccctcacagcttgtaaaggtgagagcttggaggacctaatgtgtgttgggtgtt

SEQ ID NO: 386 - DNA, 121 bp, synthetic construct
  misc_feature 1..121: note = Description of artificial sequence: synthetic polynucleotide sequence
  source 1..121: mol_type = other DNA
aggtgtgacccctcactgtgatggatatgaatttgttcatgaatatttttttctatagtgtgagacagctgccttgtgtgggactgagaggcaagagttgttcctgcccttccctttgtga

SEQ ID NO: 387 - DNA, 121 bp, synthetic construct
  misc_feature 1..121: note = Description of artificial sequence: synthetic polynucleotide sequence
  source 1..121: mol_type = other DNA
tagagaaaatacagcctcttccttacctttgaatttttttaggctccctgtgatggagtcatgtcttgattttgcttcactgagttttttctccagttccagaggaacaggggttgggttg

SEQ ID NO: 388 - DNA, 121 bp, synthetic construct
  misc_feature 1..121: note = Description of artificial sequence: synthetic polynucleotide sequence
  source 1..121: mol_type = other DNA
atgcttgatatgtgcaatttcccacacccaccgggcccacaccgttgtgccactggacgatgctacacaggagtacaaggtggggaagcagacacacgatgtcagtgtgggtaaaaaggga

SEQ ID NO: 389 - DNA, 121 bp, synthetic construct
  misc_feature 1..121: note = Description of artificial sequence: synthetic polynucleotide sequence
  source 1..121: mol_type = other DNA
cccctgccaactcacctctcccaagttgccctctctcattgcccactcaccactactagggtcctgtggggtgcgggggtcccgaggaaaagaggtgaaaaggacgacgtggagctgggga

SEQ ID NO: 390 - DNA, 121 bp, synthetic construct
  misc_feature 1..121: note = Description of artificial sequence: synthetic polynucleotide sequence
  source 1..121: mol_type = other DNA
tccgcctgcataattagttgggacctgtggacagaagggaagtggagggtggagcccagcagcccttactcccaggagaaaggcccagtgctgcagaggcagacgctcctgaaacctgaaa

SEQ ID NO: 391 - DNA, 121 bp, synthetic construct
  misc_feature 1..121: note = Description of artificial sequence: synthetic polynucleotide sequence
  source 1..121: mol_type = other DNA
cccgcagatccagctacctctgttagccgcccgaaggtacaagttgcagaagcagcttgacagcctcacagccaggaccccatcagaaggggaggcagggactcagaggcaacaaaaggta

SEQ ID NO: 392 - DNA, 121 bp, synthetic construct
  misc_feature 1..121: note = Description of artificial sequence: synthetic polynucleotide sequence
  source 1..121: mol_type = other DNA
actttggcacttgtgatatgacttgcacaggtgagttacctctctcagtgttggttcctcttctgtgaaatggggctaatcatttgctttattgagtgccttctaggctgggtactaggag

SEQ ID NO: 393 - DNA, 121 bp, synthetic construct
  misc_feature 1..121: note = Description of artificial sequence: synthetic polynucleotide sequence
  source 1..121: mol_type = other DNA
agtcacaaaggagaggtgtgaagaaatcctgcatctcagtcccacacaggcagctgtctcaggctacagaacacaatagtcatgaacaaattcaggtcagtcatggtaagcgatgacactc

SEQ ID NO: 394 - DNA, 121 bp, synthetic construct
  misc_feature 1..121: note = Description of artificial sequence: synthetic polynucleotide sequence
  source 1..121: mol_type = other DNA
ccccacccccgaccacttcagctccccagaatctcacctttacaagtgatgagagactcatcagagccctgggcactgttgctgcctggggtagaacaaaaaaaaagacctggtcagagcc

SEQ ID NO: 395 - DNA, 121 bp, synthetic construct
  misc_feature 1..121: note = Description of artificial sequence: synthetic polynucleotide sequence
  source 1..121: mol_type = other DNA
atggagtaggtgagctcctccacacgcccgccgccatcacttacacgcagcctgagagcagctccctccttttccacctgtgggaagaaaatgccctatgaggggactgggaggaggcagg

SEQ ID NO: 396 - DNA, 121 bp, synthetic construct
  misc_feature 1..121: note = Description of artificial sequence: synthetic polynucleotide sequence
  source 1..121: mol_type = other DNA
cctgagctcttcctcctacacatcatagcggtgaccacagctccaaggacagctaggacaaccaggacagccaggccagcaacgatgcccatgatggggatggtgggctgggaagatggct

SEQ ID NO: 397 - DNA, 277 bp, synthetic construct
  misc_feature 1..277: note = Description of artificial sequence: synthetic polynucleotide sequence
  source 1..277: mol_type = other DNA
ccccagctcagggtgaggggctcttgcagcccctcgtgctgcatatggcacgtgtatctctgctcttgtccagaaggcaccaccacagctgcccacttctggaaggttccatctcctgctggcctggtctccacaagctcggtgtcctgggtctggtcctccccatcccgctgccaggtcagtgtgatctccgcagggtagaagcccagggcccagcacctcagggtggcctcatggtcagagagggggtggtgggtcacgtgtgtctttgggggtt

SEQ ID NO: 398 - DNA, 277 bp, synthetic construct
  misc_feature 1..277: note = Description of artificial sequence: synthetic polynucleotide sequence
  source 1..277: mol_type = other DNA
cctgcgcgctgcagcgtctccttcccgttctccaggtatctgcggagccactccacgcacgtgccctccaggtaggctctcagctgctccgccgcacgggccgcctccaacttgcgctgggtgatctgagccgcggtgtccgcggcggtccaggagcgcaggtcctcgttcagggcgatgtaatccttgccgtcgtaggcggactggtcatacccgcggaggaggcgcccgtcgggccccaggtcgcagccagacatcctctggagggtgtgagacc

SEQ ID NO: 399 - DNA, 271 bp, synthetic construct
  misc_feature 1..271: note = Description of artificial sequence: synthetic polynucleotide sequence
  source 1..271: mol_type = other DNA
ccgtcctcgctctggttgtagtagccgcgcaggttccgcaggctcactcggtcagcctgtgcctggcgcttgtacttctgtgtctcccggtcccaatactccggcccctcctgctccacccacggcgcccgcggctcccctctcggactcgcggcgtcgctgtcgaaccgcacgaactgcgtgtcgtccacgtagcccactgagatgaagcggggctctccgcggccgggccgggacacggcggtgtcgaaatacctcatggagtgggagc

SEQ ID NO: 400 - DNA, 121 bp, synthetic construct
  misc_feature 1..121: note = Description of artificial sequence: synthetic polynucleotide sequence
  source 1..121: mol_type = other DNA
cttccctcccaaccccgcactcacaggcccaggtctcggtcagggccaggcctcccgagagcagcaggaggagggctcggggcgccatgacccgcatctcggcctctggggagaatgtgag

SEQ ID NO: 401 - DNA, 121 bp, synthetic construct
  misc_feature 1..121: note = Description of artificial sequence: synthetic polynucleotide sequence
  source 1..121: mol_type = other DNA
gccaccccacccactctagaccccaagaatctcaccttttcaagctgtgagagacacatcagagccctgggcactgtcgctgcctggagtagaacaaaaacaggacctggtcagagcccgc

SEQ ID NO: 402 - DNA, 121 bp, synthetic construct
  misc_feature 1..121: note = Description of artificial sequence: synthetic polynucleotide sequence
  source 1..121: mol_type = other DNA
aattatggggtgggtgagctcctccacactcccacccccaccacttacacgcagcctgagagtagctccctccttttccacctgtgggaagaaaatgtcctgtgagggcactgggaggaag

SEQ ID NO: 403 - DNA, 121 bp, synthetic construct
  misc_feature 1..121: note = Description of artificial sequence: synthetic polynucleotide sequence
  source 1..121: mol_type = other DNA
acctgaactcttcctcctacacatcacagcagcgaccacagctccgatgaccacaactgctaggacagccaggccagcaacaatgcccacgatggggacggtggactgggaagacggctct

SEQ ID NO: 404 - DNA, 277 bp, synthetic construct
  misc_feature 1..277: note = Description of artificial sequence: synthetic polynucleotide sequence
  source 1..277: mol_type = other DNA
ccccatctcagggtgaggggcttcggcagcccctcatgctgtacatggcatgtgtatctctgctcttctccagaaggcaccaccacagctgcccacttctggaaggttctatctcctgctggtctggtctccacaagctcagtgtcctgagtttggtcctcgccatcccgctgccaggtcagtgtgatctccgcagggtagaaacccagggcccagcacctcagggtggcctcatggtcagagatggggtggtgggtcacgtgtgtctttggggggt

SEQ ID NO: 405 - DNA, 277 bp, synthetic construct
  misc_feature 1..277: note = Description of artificial sequence: synthetic polynucleotide sequence
  source 1..277: mol_type = other DNA
ccagcgcgctccagcttgtccttcccgttctccaggtatctgcggagccactccacgcactcgccctccaggtaggctctccgctgctccgcctcacgggccgcctcccacttgcgctgggtgatctgagccgccgtgtccgcggcggtccaggagcgcaggtcctcgttcagggcgatgtaatccttgccgtcgtaggcgtactggtcatgcccgcggaggaggcgcccgtccggccccacgtcgcagccgtacatgctctggagggtgtgagacc

SEQ ID NO: 406 - DNA, 271 bp, synthetic construct
  misc_feature 1..271: note = Description of artificial sequence: synthetic polynucleotide sequence
  source 1..271: mol_type = other DNA
ccggcctcgctctggttgtagtagccgcgcaggttccgcaggctctctcggtcagtctgtgcctgggccttgtagatctgtgtgttccggtcccaatactccggcccctcctgctctatccacggcgcccgcggctcctctctcggactcgcggcgtcgctgtcgaacctcacgaactgggtgtcgtccacgtagcccactgagatgaagcggggctccccgcggccgggccgggacacggaggtgtagaaatacctcatggagtgggagc

SEQ ID NO: 407 - DNA, 121 bp, synthetic construct
  misc_feature 1..121: note = Description of artificial sequence: synthetic polynucleotide sequence
  source 1..121: mol_type = other DNA
atttccctcccgacccgcactcaccggcccaggtctcggtcagggccagggccgccgagagcagcaggaggacggttcggggcgccatgaccagcatctcggcgtctgaggagactctgag

SEQ ID NO: 408 - DNA, 121 bp, synthetic construct
  misc_feature 1..121: note = Description of artificial sequence: synthetic polynucleotide sequence
  source 1..121: mol_type = other DNA
tctctttctctgcaggttctccccatgacaccacctgaacgtctcttcctcccaagggtgtgtggcaccaccctacacctcctccttctggggctgctgctggttctgctgcctggggccc

SEQ ID NO: 409 - DNA, 121 bp, synthetic construct
  misc_feature 1..121: note = Description of artificial sequence: synthetic polynucleotide sequence
  source 1..121: mol_type = other DNA
cacggcccttcctggctggcccagcacccagcccacctgcagggagattccatagatgacgtccaggggatcgatgacattgcctagagacttgctcatcttccggccgtgagcatctcgc

SEQ ID NO: 410 - DNA, 121 bp, synthetic construct
  misc_feature 1..121: note = Description of artificial sequence: synthetic polynucleotide sequence
  source 1..121: mol_type = other DNA
ttgttggcttgctcctcagattgtccaactccagctcctggactactaagccttagctgtatgttggagcctctggatttgggtgggggtgacgaggatgagaatgaggcagtgggacagc

SEQ ID NO: 411 - DNA, 121 bp, synthetic construct
  misc_feature 1..121: note = Description of artificial sequence: synthetic polynucleotide sequence
  source 1..121: mol_type = other DNA
gctgatctggacagctccaagtgagggggctgggacatcccacaggaggcatcctgaaggggacagggactctgtcttcacttccaggacctcctctcctataaaagcctatgtggggcat

SEQ ID NO: 412 - DNA, 121 bp, synthetic construct
  misc_feature 1..121: note = Description of artificial sequence: synthetic polynucleotide sequence
  source 1..121: mol_type = other DNA
ggtctctaagccttgcagggaacaacaagaacaacaacagaaaagagtagaaaaagaaattgaacttaccgcggggtgctgaaggtggaccagctgaaaaacagagaggtatcttagcaac

SEQ ID NO: 413 - DNA, 121 bp, synthetic construct
  misc_feature 1..121: note = Description of artificial sequence: synthetic polynucleotide sequence
  source 1..121: mol_type = other DNA
acagagcgcccaagaagaaaatggccataagtggagtccctgtgctaggatttttcatcatagctgtgctgatgagcgctcaggaatcatgggctatcaaaggtaggtgctgagggaatga

SEQ ID NO: 414 - DNA, 121 bp, synthetic construct
  misc_feature 1..121: note = Description of artificial sequence: synthetic polynucleotide sequence
  source 1..121: mol_type = other DNA
gaagaacatgtgatcatccaggccgagttctatctgaatcctgaccaatcaggcgagtttatgtttgactttgatggtgatgagattttccatgtggatatggcaaagaaggagacggtct

SEQ ID NO: 415 - DNA, 121 bp, synthetic construct
  misc_feature 1..121: note = Description of artificial sequence: synthetic polynucleotide sequence
  source 1..121: mol_type = other DNA
cttgaagaatttggacgatttgccagctttgaggctcaaggtgcattggccaacatagctgtggacaaagccaacctggaaatcatgacaaagcgctccaactatactccgatcaccaatg

SEQ ID NO: 416 - DNA, 283 bp, synthetic construct
  misc_feature 1..283: note = Description of artificial sequence: synthetic polynucleotide sequence
  source 1..283: mol_type = other DNA
gtacctccagaggtaactgtgctcacaaacagccctgtggaactgagagagcccaacgtcctcatctgtttcatagacaagttcaccccaccagtggtcaatgtcacgtggcttcgaaatggaaaacctgtcaccacaggagtgtcagagacagtcttcctgcccagggaagaccaccttttccgcaagttccactatctccccttcctgccctcaactgaggacgtttacgactgcagggtggagcactggggcttggatgagcctcttctcaagcactggg

SEQ ID NO: 417 - DNA, 156 bp, synthetic construct
  misc_feature 1..156: note = Description of artificial sequence: synthetic polynucleotide sequence
  source 1..156: mol_type = other DNA
gagtttgatgctccaagccctctcccagagactacagagaacgtggtgtgtgccctgggcctgactgtgggtctggtgggcatcattattgggaccatcttcatcatcaagggattgcgcaaaagcaatgcagcagaacgcagggggcctctgtaa

SEQ ID NO: 418 - DNA, 121 bp, synthetic construct
  misc_feature 1..121: note = Description of artificial sequence: synthetic polynucleotide sequence
  source 1..121: mol_type = other DNA
agatttgcttgtctcgaggtcctcacaattgctctacagctcagagcagcaactgctgaggctgccttgggaagaagatgatcctaaacaaagctctgctgctgggggccctcgccctgac

SEQ ID NO: 419 - DNA, 121 bp, synthetic construct
  misc_feature 1..121: note = Description of artificial sequence: synthetic polynucleotide sequence
  source 1..121: mol_type = other DNA
tgagcatcctctgtttggatggccgaagctgctggcatcaaactctggtctggaagaatcagtctgggggagagacagggatggaggaaaggcatcaggggatccatcctcctcctccttc

SEQ ID NO: 420 - DNA, 121 bp, synthetic construct
  misc_feature 1..121: note = Description of artificial sequence: synthetic polynucleotide sequence
  source 1..121: mol_type = other DNA
tgagcaaggcttccggaagtagatgatgagaacaatgcccacgatgatgcccagcacacccaggccaaaggccacgccacacagcacattctccagcagatctgagggcagtgcgttccgg

SEQ ID NO: 421 - DNA, 280 bp, synthetic construct
  misc_feature 1..280: note = Description of artificial sequence: synthetic polynucleotide sequence
  source 1..280: mol_type = other DNA
ccccaataggcaattgctgtgtagcggtcaatttcgtgagtcacaatgcaggagaaaatgtcagaaggttctggtgtgaagtttaagtaagaaaaggcctggaagctgagtccatcgacagctgagacaaaagtaggcccaaatccttccacagggacggaatgatgctgccagttcactgtcagcatgggtgggaagagattactgacaaaacagaccaaagtgttgggcttgccaaactccaggggcttcagcgtgaacacttcagcgataggaaacc

SEQ ID NO: 422 - DNA, 286 bp, synthetic construct
  misc_feature 1..286: note = Description of artificial sequence: synthetic polynucleotide sequence
  source 1..286: mol_type = other DNA
cctctggacaccgggattttcccatcaagttttggccctatttgctggatcatccactcgcagaactctttgtcaaataaaatggcaggagcatctccctgttcctgagcccagtcagcaaattcgggcaggcgaggcacccgagtgttctgggaaaagtcgaagaagaaaagctggtcctcgtcgtaggcctcagagagtcccacactgggactcccatcctggcagtacactgtgtgcaggaatgtgtggttttgcaggtcatctggccacattggagtaggag

SEQ ID NO: 423 - DNA, 121 bp, synthetic construct
  misc_feature 1..121: note = Description of artificial sequence: synthetic polynucleotide sequence
  source 1..121: mol_type = other DNA
taggagtaccatcttaccttcagggacggcccaggagtggggtagcagccacagaagtggtaacatctgtagcagcgcagctccttggttctgttcatgacccataccttcttgccacaca

SEQ ID NO: 424 - DNA, 121 bp, synthetic construct
  misc_feature 1..121: note = Description of artificial sequence: synthetic polynucleotide sequence
  source 1..121: mol_type = other DNA
ccctggggaagggaatgcagggttgctggggctgggcccagaagcagcagcaccagggaagaggattcgaaaaccctctctcttgtatgagggctttgagagccccacaatggcttcggtg

SEQ ID NO: 425 - DNA, 121 bp, synthetic construct
  misc_feature 1..121: note = Description of artificial sequence: synthetic polynucleotide sequence
  source 1..121: mol_type = other DNA
tacccagggtgagactccccacagaccccctctacacctctccagcccttcccttctcacgccctcccaccccccagcttacccgggctcccttctctccactggcaccaggaaagccagg

SEQ ID NO: 426 - DNA, 121 bp, synthetic construct
  misc_feature 1..121: note = Description of artificial sequence: synthetic polynucleotide sequence
  source 1..121: mol_type = other DNA
ccctgaggatcccagaccctgcctggcttcagtcggtacacagcagcagtttccctgagatcttcaggtcatcaaagggcaaaaggacaagggactgagaaggagaatggagagaagcaag

SEQ ID NO: 427 - DNA, 241 bp, synthetic construct
  misc_feature 1..241: note = Description of artificial sequence: synthetic polynucleotide sequence
  source 1..241: mol_type = other DNA
cttcctcagtcaggtcctggggcgtctcatcctccacattccgcagcagggagtcagcacccgccttgcacagagtggatgagatgcccatgagaccccggccagctgccaggtgcaggggtgtgcacccgttcagcatgcgggcatctacctgggcaccagcctggagcaggaactgtaccaggccccgctcttgggtttccacagccaggtgcagcgctgtcttaccactggtgccctc

SEQ ID NO: 428 - DNA, 121 bp, synthetic construct
  misc_feature 1..121: note = Description of artificial sequence: synthetic polynucleotide sequence
  source 1..121: mol_type = other DNA
ttgctggctgtctcacctgcacatcaatgtcagctccattccgaagcagcaattccatgagtggttggttcttctgaagggtggcaatgtggagacaagccagacctgggatggggtgaga

SEQ ID NO: 429 - DNA, 224 bp, synthetic construct
  misc_feature 1..224: note = Description of artificial sequence: synthetic polynucleotide sequence
  source 1..224: mol_type = other DNA
ccttgccagttttgcagctggaggtccagagagtgagatgttcctctgcctggctctggccgcccttccagcaggcagcgggcacaggccaagtgctggcgctggcaggccacatgaagggctgtgtcaccatgccggtcctgtagtgcccggctggcccccttcagcaccagtgcccgaactgcgcccggttggtccagatgtacagccagatggagtgctgt

SEQ ID NO: 430 - DNA, 121 bp, synthetic construct
  misc_feature 1..121: note = Description of artificial sequence: synthetic polynucleotide sequence
  source 1..121: mol_type = other DNA
gccaccaacctggtaaaggttattttgaatgtccaggacctcctggggcagcaaagccaggcaacagagcagcaccgctggggcctcatgaatcactgccaggtggaccagcctaggggag

SEQ ID NO: 431 - DNA, 330 bp, synthetic construct
  misc_feature 1..330: note = Description of artificial sequence: synthetic polynucleotide sequence
  source 1..330: mol_type = other DNA
cgtgtctccgtcctcggagatgtaagtgagtgcttccagctgctgagggctcagcgcccccacgtgggggagtggcaggcgtggggccgggtcctcagcctcggggccccccagcaaggacagggtgtaggtgagcgaggaggagccataggtggaatcagcccgctccccatccgcgtcttccttctcctgtggttccttgacgggtcccggaggatgggtgcagggctgggggctgccgtccgagggcccggaggctggagccgaggtggactcgggtagggagcgcagagagcgcagagactcaatgccagagtcgtactggctctc

SEQ ID NO: 432 - DNA, 453 bp, synthetic construct
  misc_feature 1..453: note = Description of artificial sequence: synthetic polynucleotide sequence
  source 1..453: mol_type = other DNA
ctccgcctcgtccggccccttccgcgcctccgacatgcccgcggctctggccggccggggcccggtctgagcaggatccggctccaggctccgccgcgccgcctttccgggttgcgggtccgcttggcagagcgggcgcccggcccgcggcggcctccttcccgggctgtggggctccgaggggccggcgcgcagcgaggacaaggttcggagcgctggccaggtccacccagcggttactgtgggcagccgaaccgcccaagcgggtcctcctcctcgccccgcccctccggaccaacagggtcgcctcacgcggatggccccgccccctccccgcccccggcgggcgcttccggaaagaggccccgcccctccggaatcccccttcccgggctctgcgtaggcttggagtctgtggttcccgggccttgactcactccttcgttgattcat

SEQ ID NO: 433 - DNA, 121 bp, synthetic construct
  misc_feature 1..121: note = Description of artificial sequence: synthetic polynucleotide sequence
  source 1..121: mol_type = other DNA
atttagccttctgagctttctgggcagacttggtgaccttgccagctccagcagccttcttgtccactgctttgatgacacccaccgcaactgtctgtctcatatcacgaacagcaaagcg

SEQ ID NO: 434 - DNA, 236 bp, synthetic construct
  misc_feature 1..236: note = Description of artificial sequence: synthetic polynucleotide sequence
  source 1..236: mol_type = other DNA
cccaaaggtggatagtctgagaagctctcaacacacatgggcttgccaggaaccatatcaacaatggcagcatcaccagacttcaagaatttagggccatcttccagctttttaccagaacggcgatcaatcttttccttcagctcagcaaacttgcatgcaatgtgagccgtgtggcaatccaatacaggggcatagccggcgcttatttggcctggatggttcaggataatcac

SEQ ID NO: 435 - DNA, 258 bp, synthetic construct
  misc_feature 1..258: note = Description of artificial sequence: synthetic polynucleotide sequence
  source 1..258: mol_type = other DNA
cctgagcagtgaagccagctgcttccattggtgggtcatttttgctgtcaccagcaacgttgccacgacgaacatccttgacagacacattcttgacattgaagcccacattgtccccaggaagagcttcactcaaagcttcatggtgcatttcgacagattttacttccgttgtaacgttgactggagcaaaggtgaccaccataccgggtttgagaacaccagtctccactcggccaacaggaacagtaccaatac

SEQ ID NO: 436 - DNA, 152 bp, synthetic construct
  misc_feature 1..152: note = Description of artificial sequence: synthetic polynucleotide sequence
  source 1..152: mol_type = other DNA
ccaccaattttgtagacatcctggagaggcaggcgcaagggcttgtcagttggacgagttggtggtaggatgcagtccagagcctcaagcagcgtggttccactggcattgccatccttacgggtgactttccatcccttgaaccaaggcat

SEQ ID NO: 437 - DNA, 298 bp, synthetic construct
  misc_feature 1..298: note = Description of artificial sequence: synthetic polynucleotide sequence
  source 1..298: mol_type = other DNA
cgttagcacttggctccagcatgttgtcaccattccaaccagaaattggcacaaatgctactgtgtcggggttgtagccaattttcttaatgtaagtgctgacttccttaacaatttcctcatatctcttctggctgtagggtggctcagtggaatccattttgttaacaccgacaattagttgtttcacacccagtgtgtaagccagaagggcatgctctcgggtctgcccattcttggagataccagcttcaaattcaccaacaccagcagcaacaatcaggacagcacagtcagc

SEQ ID NO: 438 - DNA, 181 bp, synthetic construct
  misc_feature 1..181: note = Description of artificial sequence: synthetic polynucleotide sequence
  source 1..181: mol_type = other DNA
cctgagatgtccctgtaatcatgtttttgataaagtctctgtgtcctggggcatcaatgatagtcacatagtacttgctggtctcaaatttccacaaggagatatcaatggtgataccacgttcacgctcagctttcagtttatccaagacccaggcatacttgaaggagccctttcccat

SEQ ID NO: 439 - DNA, 145 bp, synthetic construct
  misc_feature 1..145: note = Description of artificial sequence: synthetic polynucleotide sequence
  source 1..145: mol_type = other DNA
cctcagcagcctccttctcaaatttttcaatggttcttttgtcgatgccaccgcatttatagatcagatggccagtagtggtggacttgcccgaatctacgtgtccaatgacgacaatgttgatatgagtcttttcctttcccat

SEQ ID NO: 440 - DNA, 121 bp, synthetic construct
  misc_feature 1..121: note = Description of artificial sequence: synthetic polynucleotide sequence
  source 1..121: mol_type = other DNA
tattaaggtacattttatcaacatgttcttctgtggcagttacttcagttacttgtggacagctgttttccatactctcatttgtggtcttttgtaaaatcacattctcatcatttttgtc

SEQ ID NO: 441 - DNA, 121 bp, synthetic construct
  misc_feature 1..121: note = Description of artificial sequence: synthetic polynucleotide sequence
  source 1..121: mol_type = other DNA
aggttcacatgttgtgagtcttgagacaaaatatttgggttcatcttcaggggtaaagagctaaaaaattcagtttcttttctttcggccactttctcagagctataaaacaaaacaggac

SEQ ID NO: 442 - DNA, 121 bp, synthetic construct
  misc_feature 1..121: note = Description of artificial sequence: synthetic polynucleotide sequence
  source 1..121: mol_type = other DNA
aaacccagtctcaaaaaaaaaaaaaaaaaaaaaggcttgcaattagtgtatgtcctttctcacccacaggaaatcaactttcagatggaaagaaatacaaataccaagcgtgaaactcacc

SEQ ID NO: 443 - DNA, 121 bp, synthetic construct
  misc_feature 1..121: note = Description of artificial sequence: synthetic polynucleotide sequence
  source 1..121: mol_type = other DNA
tgtcctcttcggttctcattctttcaccatagaccaaaaacacatgctgaccaggatcataacacccaggggactggtcaaccagcatcaactgacaccagcggaaaaggtcccggaggtt

SEQ ID NO: 444 - DNA, 121 bp, synthetic construct
  misc_feature 1..121: note = Description of artificial sequence: synthetic polynucleotide sequence
  source 1..121: mol_type = other DNA
ttgttcttttaacaaataaaacaaggcaaacacttaccatctggcatccttattctgttgatacatctcccaagtatagcataaaattaaaatatagcacaccaaaatcaagggtagaggg

SEQ ID NO: 445 - DNA, 121 bp, synthetic construct
  misc_feature 1..121: note = Description of artificial sequence: synthetic polynucleotide sequence
  source 1..121: mol_type = other DNA
agttgttatcgtcaaataaagtgtatacctgtaaaatgagagagagaagagagagagagaaagaacaacaccattacattaattggattaggaattggcttttgcagtttccgaggcataa

SEQ ID NO: 446 - DNA, 121 bp, synthetic construct
  misc_feature 1..121: note = Description of artificial sequence: synthetic polynucleotide sequence
  source 1..121: mol_type = other DNA
acatatttcagatttttagcatagttttttcccagtattttcaggaagggcaattcattgtgtcaaattaaatatgatatattttaaaatattttaagtgtctatgtaaatagaggtatac

SEQ ID NO: 447 - DNA, 121 bp, synthetic construct
  misc_feature 1..121: note = Description of artificial sequence: synthetic polynucleotide sequence
  source 1..121: mol_type = other DNA
ctgctgctctcctcttgaactctattatctgggcagactgaatttattttagttttttgaaagtgcaatacaattgatcctcattattgacagattctatatttacaaatgctcttactgg

SEQ ID NO: 448 - DNA, 121 bp, synthetic construct
  misc_feature 1..121: note = Description of artificial sequence: synthetic polynucleotide sequence
  source 1..121: mol_type = other DNA
ctctttcaaacacacacatctcaattattgtttcaggattatccatcctatacagcctttggccaaaaccagtatgcacagtattattcagcatcaacgtatggagcgtatatgacatcga

SEQ ID NO: 449 - DNA, 121 bp, synthetic construct
  misc_feature 1..121: note = Description of artificial sequence: synthetic polynucleotide sequence
  source 1..121: mol_type = other DNA
tgattctatgtagtgagtcccattgggtcacctgaagaacaactgaccaccaatgaaaagaccaagatacatataattgatttccataatggatgttctcctgactcccaaatctaatttt

SEQ ID NO: 450 - DNA, 121 bp, synthetic construct
  misc_feature 1..121: note = Description of artificial sequence: synthetic polynucleotide sequence
  source 1..121: mol_type = other DNA
ttagcaatttgaggtaaatctattcattgataacttacataagatttagtttggtttcaatgtttttcacaatctttatccatgctttatgatgccctcataagtatcaattcatgttaga

SEQ ID NO: 451 - DNA, 121 bp, synthetic construct
  misc_feature 1..121: note = Description of artificial sequence: synthetic polynucleotide sequence
  source 1..121: mol_type = other DNA
aagctaaatttggtgccagacgcttagcccgtagtctgcagaaactaggttttcaggtaacgttttcaaatagtatctaaactacaaatattcaaggacttatttttatagaattaaaaat

SEQ ID NO: 452 - DNA, 121 bp, synthetic construct
  misc_feature 1..121: note = Description of artificial sequence: synthetic polynucleotide sequence
  source 1..121: mol_type = other DNA
cgtgccacagaaggtggatgttgtgctgttgtgttcaatgttctccttgcagagtccgaagtcagtaaggacaatgtgtccctgtgaatctagcaaaatattctctggttttaagtctctg

SEQ ID NO: 453 - DNA, 121 bp, synthetic construct
  misc_feature 1..121: note = Description of artificial sequence: synthetic polynucleotide sequence
  source 1..121: mol_type = other DNA
cacagaaaccagataaattgagcctactagttagacttgatgattagctaggctgatgatgtggtgagtttctcctgacttatatctgaatgtccctttgcctagacgtttctctccattg

SEQ ID NO: 454 - DNA, 121 bp, synthetic construct
  misc_feature 1..121: note = Description of artificial sequence: synthetic polynucleotide sequence
  source 1..121: mol_type = other DNA
gacagggttttaagcacaaaactgacatgattagacttgatttcagttagcaatatggaggaatttcaaaagcattgaagactgaagatgcaaagaaccagttagtaggtagttattataa

SEQ ID NO: 455 - DNA, 121 bp, synthetic construct
  misc_feature 1..121: note = Description of artificial sequence: synthetic polynucleotide sequence
  source 1..121: mol_type = other DNA
tcctacctaactgcagcaggcattgttctggctttctacaccccagggatgctttgagttgcttaaatgctcataaactgtttctgcctagcatatttgcacattctttcctctgtcagga

SEQ ID NO: 456 - DNA, 121 bp, synthetic construct
  misc_feature 1..121: note = Description of artificial sequence: synthetic polynucleotide sequence
  source 1..121: mol_type = other DNA
gacaacaccagcagctattgtagaaccaccgtaacgtagcatgaacctccccagctctttaaagtctttatatagctcaagagctattggtctttgtgtctgtagctctaccaatgcattc

SEQ ID NO: 457 - DNA, 121 bp, synthetic construct
  misc_feature 1..121: note = Description of artificial sequence: synthetic polynucleotide sequence
  source 1..121: mol_type = other DNA
cttgcaggtaattactattccaacattggtattttaaaattcattcactgaaaaactgtcatctttggtggtggtggtggtggtggtgatggtagtgctggtggtctgtttttcgttttca

SEQ ID NO: 458 - DNA, 121 bp, synthetic construct
  misc_feature 1..121: note = Description of artificial sequence: synthetic polynucleotide sequence
  source 1..121: mol_type = other DNA
aaaatatatgactattattgaaagagctacagaaaggaactctgtacaattcatggtacacggccaagaaaagatcattttgaaagagaaactagtaaaagtcgatgtattatggacaatt

SEQ ID NO: 459 - DNA, 121 bp, synthetic construct
  misc_feature 1..121: note = Description of artificial sequence: synthetic polynucleotide sequence
  source 1..121: mol_type = other DNA
tctacttctatttttgaaaagtgatattgagaatttaattgtaattagtttcaaggaaagcgtatgagtaacaatactctgttacaaagtcaaaacattccgtagaaaatagctatgagtc

SEQ ID NO: 460 - DNA, 121 bp, synthetic construct
  misc_feature 1..121: note = Description of artificial sequence: synthetic polynucleotide sequence
  source 1..121: mol_type = other DNA
aggccttcaagcctgcccagctcacatttgcttatgttttctgctgcttaaataataacaattcagcaaagttaagtgaggactgtctctcaatgtctaatatttattaacgagctatgtt

SEQ ID NO: 461 - DNA, 121 bp, synthetic construct
  misc_feature 1..121: note = Description of artificial sequence: synthetic polynucleotide sequence
  source 1..121: mol_type = other DNA
tccccttcccttttattctttccttcttcttggagtccctcttatttgagtgatccctgaaaagggtactcactgctaagaagaacgacctgggttacataacaagtccttacagaacaat

SEQ ID NO: 462 - DNA, 121 bp, synthetic construct
  misc_feature 1..121: note = Description of artificial sequence: synthetic polynucleotide sequence
  source 1..121: mol_type = other DNA
gggccggggccagggtggggtgcggccgcacctgcctctgggcgcgctctgcctcctcccgctcgcgcagcgcccgctcctccgcctgccgctgcagctgctcctccttctcccgggcctg

SEQ ID NO: 463 - DNA, 121 bp, synthetic construct
  misc_feature 1..121: note = Description of artificial sequence: synthetic polynucleotide sequence
  source 1..121: mol_type = other DNA
cacaagttcttgcttggccacaggctgttctgtggtcagtttcacaaaatgcttatatattaaaattgtctctacaatagacttgaggtacctgagaaggaaaagatataaaacatgtaac

SEQ ID NO: 464 - DNA, 121 bp, synthetic construct
  misc_feature 1..121: note = Description of artificial sequence: synthetic polynucleotide sequence
  source 1..121: mol_type = other DNA
cgaggaggtggccgccggacaaccgatgccaggggcagcggcgctctccacgttccagaagctgcccggcggcggcggtggcagctggtgctcctcgccctcgcccaccgccgccgctcct

SEQ ID NO: 465 - DNA, 121 bp, synthetic construct
  misc_feature 1..121: note = Description of artificial sequence: synthetic polynucleotide sequence
  source 1..121: mol_type = other DNA
catattcaatgactgttttatccgggggtattgttctgctgagggactcttgctgggtgagagaagtaccttccgtgttttcttcagagtcacaaaaaatttccatcaaatgcgaagcata

SEQ ID NO: 466 - DNA, 121 bp, synthetic construct
  misc_feature 1..121: note = Description of artificial sequence: synthetic polynucleotide sequence
  source 1..121: mol_type = other DNA
cccggctggggcggatccctccctccctctcgtcccgacccggccgcagccctgccgcgaacgacggtacctgaggacggccccagatccgcggtgcccatctcagccctgctcacaccct

SEQ ID NO: 467 - DNA, 121 bp, synthetic construct
  misc_feature 1..121: note = Description of artificial sequence: synthetic polynucleotide sequence
  source 1..121: mol_type = other DNA
taaagaaagagggtcagagagtgctcttctgcttttgtggttttctcgatttctttcagccgtaaatactcagtatgcccaggtgtcattgtagaagatgagaatggaaggcacagaaaga

SEQ ID NO: 468 - DNA, 121 bp, synthetic construct
  misc_feature 1..121: note = Description of artificial sequence: synthetic polynucleotide sequence
  source 1..121: mol_type = other DNA
acatcgccaaaagcatccttaatgatgagtaaggtagagagtttcagcagagtgtgagcctatagcatatgggatttctagatttcaccatttgcaaaatgagacagaatcatcctcctaa

SEQ ID NO: 469 - DNA, 296 bp, synthetic construct
  misc_feature 1..296: note = Description of artificial sequence: synthetic polynucleotide sequence
  source 1..296: mol_type = other DNA
aatggctgaacaagtccttcctcaggctttgtatttgagcaatatgcggaaagctgtgaagatacgggagagaactccagaagacatttttaaacctactaatgggatcattcatcattttaaaaccatgcaccgatacacactggaaatgttcagaacttgccagttttgtcctcagtttcgggagatcatccacaaagccctcatcgacagaaacatccaggccaccctggaaagccagaagaaactcaactggtgtcgagaagtccggaagcttgtggcgctgaaaacgaacg

SEQ ID NO: 470 - DNA, 192 bp, synthetic construct
  misc_feature 1..192: note = Description of artificial sequence: synthetic polynucleotide sequence
  source 1..192: mol_type = other DNA
ggtgacggcaattgcctcatgcatgccacttctcagtacatgtggggcgttcaggacacagacttggtactgaggaaggcgctgttcagcacgctcaaggaaacagacacacgcaactttaaattccgctggcaactggagtctctcaaatctcaggaatttgttgaaacggggctttgctatgatactcgg

SEQ ID NO: 471 - DNA, 149 bp, synthetic construct
  misc_feature 1..149: note = Description of artificial sequence: synthetic polynucleotide sequence
  source 1..149: mol_type = other DNA
gaactggaatgatgaatgggacaatcttatcaaaatggcttccacagacacacccatggcccgaagtggacttcagtacaactcactggaagaaatacacatatttgtcctttgcaacatcctcagaaggccaatcattgtcatttcag

SEQ ID NO: 472 - DNA, 172 bp, synthetic construct
  misc_feature 1..172: note = Description of artificial sequence: synthetic polynucleotide sequence
  source 1..172: mol_type = other DNA
gacaaaatgctaagaagtttggaatcaggttccaatttcgcccctttgaaagtgggtggaatttacttgcctctccactggcctgcccaggaatgctacagataccccattgttctcggctatgacagccatcattttgtacccttggtgaccctgaaggacagtgggcctg

SEQ ID NO: 473 - DNA, 182 bp, synthetic construct
  misc_feature 1..182: note = Description of artificial sequence: synthetic polynucleotide sequence
  source 1..182: mol_type = other DNA
gaaatccgagctgttccacttgttaacagagaccggggaagatttgaagacttaaaagttcactttttgacagatcctgaaaatgagatgaaggagaagctcttaaaagagtacttaatggtgatagaaatccccgtccaaggctgggaccatggcacaactcatctcatcaatgccgcaaa

SEQ ID NO: 474 - DNA, 457 bp, synthetic construct
  misc_feature 1..457: note = Description of artificial sequence: synthetic polynucleotide sequence
  source 1..457: mol_type = other DNA
ggttggatgaagctaacttaccaaaagaaatcaatctggtagatgattactttgaacttgttcagcatgagtacaagaaatggcaggaaaacagcgagcaggggaggagagaggggcacgcccagaatcccatggaaccttccgtgccccagctttctctcatggatgtaaaatgtgaaacgcccaactgccccttcttcatgtctgtgaacacccagcctttatgccatgagtgctcagagaggcggcaaaagaatcaaaacaaactcccaaagctgaactccaagccgggccctgaggggctccctggcatggcgctcggggcctctcggggagaagcctatgagcccttggcgtggaaccctgaggagtccactggggggcctcattcggccccaccgacagcacccagcccttttctgttcagtgagaccactgccatgaagtgcaggagccc

SEQ ID NO: 475 - DNA, 464 bp, synthetic construct
  misc_feature 1..464: note = Description of artificial sequence: synthetic polynucleotide sequence
  source 1..464: mol_type = other DNA
cggctgccccttcacactgaatgtgcagcacaacggattttgtgaacgttgccacaacgcccggcaacttcacgccagccacgccccagaccacacaaggcacttggatcccgggaagtgccaagcctgcctccaggatgttaccaggacatttaatgggatctgcagtacttgcttcaaaaggactacagcagaggcctcctccagcctcagcaccagcctccctccttcctgtcaccagcgttccaagtcagatccctcgcggctcgtccggagcccctccccgcattcttgccacagagctggaaacgacgcccctgctggctgcctgtctcaagctgcacggactcctggggacaggacggggacgagcaagtgcagaaaagccggctgcgtgtattttgggactccagaaaacaagggcttttgcacactgtgtttcatcgagtacagagaaaacaaac

SEQ ID NO: 476 - DNA, 183 bp, synthetic construct
  misc_feature 1..183: note = Description of artificial sequence: synthetic polynucleotide sequence
  source 1..183: mol_type = other DNA
gattttgctgctgcctcagggaaagtcagtcccacagcgtccaggttccagaacaccattccgtgcctggggagggaatgcggcacccttggaagcaccatgtttgaaggatactgccagaagtgtttcattgaagctcagaatcagagatttcatgaggccaaaaggacagaagagcaactg

SEQ ID NO: 477 - DNA, 286 bp, synthetic construct
  misc_feature 1..286: note = Description of artificial sequence: synthetic polynucleotide sequence
  source 1..286: mol_type = other DNA
gagatcgagccagcgcagagatgtgcctcgaaccacacaaagcacctcaaggcccaagtgcgcccgggcctcctgcaagaacatcctggcctgccgcagcgaggagctctgcatggagtgtcagcatcccaaccagaggatgggccctggggcccaccggggtgagcctgcccccgaagacccccccaagcagcgttgccgggcccccgcctgtgatcattttggcaatgccaagtgcaacggctactgcaacgaatgctttcagttcaagcagatgtatggctaa

SEQ ID NO: 478 - DNA, 121 bp, synthetic construct
  misc_feature 1..121: note = Description of artificial sequence: synthetic polynucleotide sequence
  source 1..121: mol_type = other DNA
ggcattgcccagaaggtcatcttcgtagttggggaggcagcagaagaagaaggcacagccaatcaggataatcgtggctgcccacccaaagccgtaggcccagttatagatgtaagtgaca

SEQ ID NO: 479 - DNA, 121 bp, synthetic construct
  misc_feature 1..121: note = Description of artificial sequence: synthetic polynucleotide sequence
  source 1..121: mol_type = other DNA
gatcagcacagcgccaggctgttcatacagtccctggaaggcctcctccctcggctcctgtctctctccaatgtagaggaggtggacaccgctctgcagaactttgcctctactttctgct

SEQ ID NO: 480 - DNA, 121 bp, synthetic construct
  misc_feature 1..121: note = Description of artificial sequence: synthetic polynucleotide sequence
  source 1..121: mol_type = other DNA
ttgcatgaggagaaaccacacacgctgggctcattatattttcactctcgaagtgtctcaactcctgggatttgggtctcaaaagtgttccagtccctgaggcacctcctaaatggcctaa

SEQ ID NO: 481 - DNA, 121 bp, synthetic construct
  misc_feature 1..121: note = Description of artificial sequence: synthetic polynucleotide sequence
  source 1..121: mol_type = other DNA
cacaggcagaattccaataaagcacagttttcttccatagttgcaacctcaaaaaaagtgctgaaattcaaataatcttaagttctgccgcctgtacacataggaatattctccttataat

SEQ ID NO: 482 - DNA, 121 bp, synthetic construct
  misc_feature 1..121: note = Description of artificial sequence: synthetic polynucleotide sequence
  source 1..121: mol_type = other DNA
tatttaggtcttaagaagctggccgtggtgcaataaggaacttaaaacaatggaagagcggaaagtgaagaggaggagtcctaagtcttttagtgcccactgtactcaggttgtcaatgcc

SEQ ID NO: 483 - DNA, 121 bp, synthetic construct
  misc_feature 1..121: note = Description of artificial sequence: synthetic polynucleotide sequence
  source 1..121: mol_type = other DNA
atgccattccagtgagtaaaagcacagggttttcaaatcctgcatcacagtcaacttcacagcgaccaaagttaaaaaggtgaattcttttattttacatgttcacagtaaaatgccatta

SEQ ID NO: 484 - DNA, 121 bp, synthetic construct
  misc_feature 1..121: note = Description of artificial sequence: synthetic polynucleotide sequence
  source 1..121: mol_type = other DNA
ctgagttttcagagatgtcaagacctgcctccaataaccaagtttccattcaatcttcaggaaagaaatgttgtagaagacaattcttgggacacaaagtccaggctcagcaaaaatgatt

SEQ ID NO: 485 - DNA, 121 bp, synthetic construct
  misc_feature 1..121: note = Description of artificial sequence: synthetic polynucleotide sequence
  source 1..121: mol_type = other DNA
gaacacagggaggcctcctggtgaggcggcggaggaggcaaaaaagtgcaggcccccaaataagccccagaaaggcccaagccacgacctcccccgccggcattccatggaccggcagaac

SEQ ID NO: 486 - DNA, 121 bp, synthetic construct
  misc_feature 1..121: note = Description of artificial sequence: synthetic polynucleotide sequence
  source 1..121: mol_type = other DNA
gttacacaccatacacacacacacataatttaaacaactgcatcagcaaatttgcaatgtcatgttctggaaatatttcctagggtggcaagcttttttggcatttgcttgcaggctgata

SEQ ID NO: 487 - DNA, 121 bp, synthetic construct
  misc_feature 1..121: note = Description of artificial sequence: synthetic polynucleotide sequence
  source 1..121: mol_type = other DNA
aggaacacagagatgattctaacaaagtccttttcccagaagtgcccagtcattatgtttgagcagacgttagaattgctgcaggccttggacaccacacgccactttccctgctgaacct

SEQ ID NO: 488 - DNA, 121 bp, synthetic construct
  misc_feature 1..121: note = Description of artificial sequence: synthetic polynucleotide sequence
  source 1..121: mol_type = other DNA
tttttttttttttgtcattggcaagcataggccttactgaccgtttataagtcatcttgtaagttatttttcatcattgtcagttctggagaatcatattgaggaagactgtggtttaagg

SEQ ID NO: 489 - DNA, 121 bp, synthetic construct
  misc_feature 1..121: note = Description of artificial sequence: synthetic polynucleotide sequence
  source 1..121: mol_type = other DNA
acattgtagtgtatcagagtgtctgcatattttttaatgaaacaggtttacttgatctgtgatttacatctaaccatctctccaaatctataatctatatctgtatcagtcatttatacat

SEQ ID NO: 490 - DNA, 121 bp, synthetic construct
  misc_feature 1..121: note = Description of artificial sequence: synthetic polynucleotide sequence
  source 1..121: mol_type = other DNA
cttaatggttgctggttctactgcaggaatattgtttcttttctgttatcctccttgaccgcatctgaaataaacattgggggaaatgacctaattgggagctgagcagctttcccaattc

SEQ ID NO: 491 - DNA, 121 bp, synthetic construct
  misc_feature 1..121: note = Description of artificial sequence: synthetic polynucleotide sequence
  source 1..121: mol_type = other DNA
attcataaattgtacacaggtaaatgtgagataatagtacatgtttctactccaaacatacagaggattttgaatttgaagcacagcttaataacactcctaatggaaatatataaacctc

SEQ ID NO: 492 - DNA, 121 bp, synthetic construct
  misc_feature 1..121: note = Description of artificial sequence: synthetic polynucleotide sequence
  source 1..121: mol_type = other DNA
taggtgttttgttgtccctcaataacagctgcagagcctctataagtcctttaatcttccctgatgaagtctatgccccagctgggtgtaatcctcatccgaagcatactgaaactcggaa

SEQ ID NO: 493 - DNA, 121 bp, synthetic construct
  misc_feature 1..121: note = Description of artificial sequence: synthetic polynucleotide sequence
  source 1..121: mol_type = other DNA
acctagtagcaggattgctggatcaaactgtagatatacttttagttctttaaggactctttacagtgttttccatagcatctgtgctagtttgcattcccgtcaatagtgcaaaagcatt

SEQ ID NO: 494 - DNA, 121 bp, synthetic construct
  misc_feature 1..121: note = Description of artificial sequence: synthetic polynucleotide sequence
  source 1..121: mol_type = other DNA
ttagctagtgtttatattaccatcttttctatttgttctctctagaactgaagaactctttttgcatggtaactttgaactgaatcacttgcaggcaatttacaaggtaacctcagtgtct

SEQ ID NO: 495 - DNA, 121 bp, synthetic construct
  misc_feature 1..121: note = Description of artificial sequence: synthetic polynucleotide sequence
  source 1..121: mol_type = other DNA
actatgtagaaactagcaaaaataatgaacatggaagcatgtgatatgcatcttaaatttctcaatgcaatttatagaagttgtattgaagtacatagaaataattttataatgaaaacaa

SEQ ID NO: 496 - DNA, 121 bp, synthetic construct
  misc_feature 1..121: note = Description of artificial sequence: synthetic polynucleotide sequence
  source 1..121: mol_type = other DNA
ctcttgaattcacttttcggtgctcactttctgatgtttgtagagatgagattgtgtccattaatcctgataaacacttaactatgcttcttaaatctaaacatttctgatttctttttaa

SEQ ID NO: 497 - DNA, 121 bp, synthetic construct
  misc_feature 1..121: note = Description of artificial sequence: synthetic polynucleotide sequence
  source 1..121: mol_type = other DNA
aagcttgcatatatgggtacagcgggtatatagagaatctgtgtaccttctaatcaattactctgtgaccatacagctgctttgaaagtaaagtctgtctttaaaaataagatttaaattg

SEQ ID NO: 498 - DNA, 121 bp, synthetic construct
  misc_feature 1..121: note = Description of artificial sequence: synthetic polynucleotide sequence
  source 1..121: mol_type = other DNA
ggtcctacgaattgttctacccaagcataccacggccaatgcctgaattcaccaccagtaggcttgaagaaaagtcttcccagccaaactctggctctgcagtgcctgaacatgccttctg

SEQ ID NO: 499 - DNA, 121 bp, synthetic construct
  misc_feature 1..121: note = Description of artificial sequence: synthetic polynucleotide sequence
  source 1..121: mol_type = other DNA
actcctgaatgtcgcaaatttttatcaaagttaatggatcagttagaagctgtaagttaaccactgatcatttattttctggttatggttaaaataccattttattcatttgcgtgtctgt

SEQ ID NO: 500 - DNA, 121 bp, synthetic construct
  misc_feature 1..121: note = Description of artificial sequence: synthetic polynucleotide sequence
  source 1..121: mol_type = other DNA
cgggaaagtggtggaggatgatcttgcggccaaaggggacctcggcgcagtaatgtcaacatgtaagtctcacctttcagcttggaattccttcactcttttatctgtgtccaccttctgt

SEQ ID NO: 501 - DNA, 121 bp, synthetic construct
  misc_feature 1..121: note = Description of artificial sequence: synthetic polynucleotide sequence
  source 1..121: mol_type = other DNA
ttctttgcaggatgtttcgctcagatcgaatgtggagctgccattggaaatggaagcccagtcctctcctgttcttatttgctttatatatcatgtgtgttcctcactcaggtaagactct

SEQ ID NO: 502 - DNA, 343 bp, synthetic construct
  misc_feature 1..343: note = Description of artificial sequence: synthetic polynucleotide sequence
  source 1..343: mol_type = other DNA
gtgtggggatgtgccaactgccgagtggttttgtccaacccttctgggacctttacttctccatgctaccctaacgactacccaaacagccaggcttgcatgtggacgctccgagcccccaccggttatatcattcagataacatttaacgactttgacattgaagaagctcccaattgcatttatgactcattatcccttgataatggagagagccagactaaattttgtggagcaactgccaaaggcctatcatttaactcaagtgcgaatgagatgcatgtgtccttttcaagtgactttagcatccagaagaaaggtttcaatgccagctacatcagag

SEQ ID NO: 503 - DNA, 302 bp, synthetic construct
  misc_feature 1..302: note = Description of artificial sequence: synthetic polynucleotide sequence
  source 1..302: mol_type = other DNA
gttgccgtgtccttaaggaatcaaaaggtcattttaccccagacatcagatgcttaccaggtatctgttgcaaaaagcatctctattccagagctcagtgctttcacactctgctttgaagcaaccaaagttggccatgaagacagtgattggacagctttctcctactcaaatgcatccttcacacaattgctcagttttggaaaggccaagagtggctactttctatccatttctgattcaaaatgtttgttgaataatgcattacctgtcaaagaaaaagaagacatttttgcagaaag

SEQ ID NO: 504 - DNA, 323 bp, synthetic construct
  misc_feature 1..323: note = Description of artificial sequence: synthetic polynucleotide sequence
  source 1..323: mol_type = other DNA
ctttgaacagctctgccttgtttggaataattctttgggctctattggtgtaaatttcaaaagaaactatgaaacagttccatgtgattctaccattagtaaagttattcctgggaatgggaaattgttgttgggctccaatcaaaatgaaattgtctctctaaaaggggacatttataactttcgactttggaattttaccatgaatgccaaaatcctctccaacctcagctgtaatgtgaaagggaatgtagtcgactggcaaaatgacttctggaatatcccaaacctagctctgaaagctgaaagcaacctaagctgtg

SEQ ID NO: 505 - DNA, 121 bp, synthetic construct
  misc_feature 1..121: note = Description of artificial sequence: synthetic polynucleotide sequence
  source 1..121: mol_type = other DNA
tacatattctttttgtgttgatcaaggttcctacctgatcccgctcccagcagcagaactggccagctgtgcagacctggggaccctctgtcaaggtagggagcccacaccgtgctctgga

SEQ ID NO: 506 - DNA, 121 bp, synthetic construct
  misc_feature 1..121: note = Description of artificial sequence: synthetic polynucleotide sequence
  source 1..121: mol_type = other DNA
ttctcatctttattaccagctactgtaaactctcctagtactacaccacccactgtcaccactaacatgcctgttactaacagaatcgataaacaaaggaatggtaagaaatcattacctt

SEQ ID NO: 507 - DNA, 121 bp, synthetic construct
  misc_feature 1..121: note = Description of artificial sequence: synthetic polynucleotide sequence
  source 1..121: mol_type = other DNA
cctatttccaatgggcagatggaattatctatagaatatccgtagtgattcagaacatccttcgtcaccctgaggtaaaagtacagagcaaggtggcagaatgggtaagtgagcttgtaac

SEQ ID NO: 508 - DNA, 121 bp, synthetic construct
  misc_feature 1..121: note = Description of artificial sequence: synthetic polynucleotide sequence
  source 1..121: mol_type = other DNA
agcaaaactcagccttttccattgtgttttccagctcaattcaaccttccaaaattggaactacacggtttatgtcgttaatatcaggtaagacagaataaattatttgataaattaaaag

SEQ ID NO: 509 - DNA, 121 bp, synthetic construct
  misc_feature 1..121: note = Description of artificial sequence: synthetic polynucleotide sequence
  source 1..121: mol_type = other DNA
ttaatgaatatatgtatttgtgtttttagttttcacctgagtgctggagaggacaagattaaagtcaagagaagccttgaggatgagccaaggtaacaggacaaagtattgtaaagagtat

SEQ ID NO: 510 - DNA, 144 bp, synthetic construct
  misc_feature 1..144: note = Description of artificial sequence: synthetic polynucleotide sequence
  source 1..144: mol_type = other DNA
ggttggtgctttgggcccttctagtttacaatgctaccaacaatactaatttggaaggaaaaatcattcagcagaagctcctaaaaaataatgagtccttggatgaaggcttgaggctacatacagtgaatgtgagacaactgg

SEQ ID NO: 511 - DNA, 121 bp, synthetic construct
  misc_feature 1..121: note = Description of artificial sequence: synthetic polynucleotide sequence
  source 1..121: mol_type = other DNA
tataggtcattgtcttgccatggaggaacccaaaggctactactggccatctatccaaccttctgaatacgttcttccttgtccagacaagcctggcttttctgcttctcggatatggtaa

SEQ ID NO: 512 - DNA, 121 bp, synthetic construct
  misc_feature 1..121: note = Description of artificial sequence: synthetic polynucleotide sequence
  source 1..121: mol_type = other DNA
tatttaaaatatctattttgtttcatagtttttacaatgctaccaacccattggtaacctactggggacctgttgatatctccaactgtttaagtaagtgagcagttttcctttatttctc

SEQ ID NO: 513 - DNA, 212 bp, synthetic construct
  misc_feature 1..212: note = Description of artificial sequence: synthetic polynucleotide sequence
  source 1..212: mol_type = other DNA
gaagaagcaaatgaagttgctaaccagattttaaatttaactgctgatgggcagaacttaacctcagccaatattaccaacattgtggaacaggtcaaaagaattgtgaataaagaagaaaacattgatataacacttggctcaactctaatgaatatattttctaatatcttaagcagttcagacagtgacttgcttgagtcatcttctga

SEQ ID NO: 514 - DNA, 173 bp, synthetic construct
  misc_feature 1..173: note = Description of artificial sequence: synthetic polynucleotide sequence
  source 1..173: mol_type = other DNA
gagctttaaaaacaattgatgaattggccttcaagatagacctaaatagcacatcacatgtgaatattacaactcggaacttggctctcagcgtatcatccctgttaccagggacaaatgcaatttcaaattttagcattggtcttccaagcaataatgaatcgtatttccag

SEQ ID NO: 515 - DNA, 142 bp, synthetic construct
  misc_feature 1..142: note = Description of artificial sequence: synthetic polynucleotide sequence
  source 1..142: mol_type = other DNA
gatggattttgagagtggacaagtggatccactggcatctgtaattttgcctccaaacttacttgagaatttaagtccagaagattctgtattagttagaagagcacagtttactttcttcaacaaaactggacttttccag

SEQ ID NO: 516 - DNA, 121 bp, synthetic construct
  misc_feature 1..121: note = Description of artificial sequence: synthetic polynucleotide sequence
  source 1..121: mol_type = other DNA
ggatgtaggaccccaaagaaaaactttagtgagttatgtgatggcgtgcagtattggaaacattactatccagaatctgaaggatcctgttcaaataaaaatcaaacatacaagaactcag

SEQ ID NO: 517 - DNA, 121 bp, synthetic construct
  misc_feature 1..121: note = Description of artificial sequence: synthetic polynucleotide sequence
  source 1..121: mol_type = other DNA
aaacacaatttcacatgtttattcttatgttaatataggaagtgcatcatcccatctgtgccttctgggatctgaacaaaaacagtaagttttaaaatattggttgtcttaatatagataa

SEQ ID NO: 518 - DNA, 121 bp, synthetic construct
  misc_feature 1..121: note = Description of artificial sequence: synthetic polynucleotide sequence
  source 1..121: mol_type = other DNA
tcaacagaaagttttggaggatggaacacgtcaggatgtgttgcacacagagattcagatgcaagtgagacagtctgcctgtgtaaccacttcacacactttggagttctgatggtaaggg

SEQ ID NO: 519 - DNA, 121 bp, synthetic construct
  misc_feature 1..121: note = Description of artificial sequence: synthetic polynucleotide sequence
  source 1..121: mol_type = other DNA
cttccaagaagtgcctcacagttagatgcaagaaacactaaagtcctcactttcatcagctatattgggtgtggaatatctgctattttttcagcagcaactctcctgacatatgttgctt

SEQ ID NO: 520 - DNA, 270 bp, synthetic construct
  misc_feature 1..270: note = Description of artificial sequence: synthetic polynucleotide sequence
  source 1..270: mol_type = other DNA
ggaaattgcgaagggattatccctccaaaatcttgatgaacctgagcacagccctgctgttcctgaatctcctcttcctcctagatggctggatcacctccttcaatgtggatggactttgcattgctgttgcagtcctgttgcatttcttccttctggcaacctttacctggatggggctagaagcaattcacatgtacattgctctagttaaagtatttaacacttacattcgccgatacattctaaaattctgcatcattggctggg

SEQ ID NO: 521 - DNA, 121 bp, synthetic construct
  misc_feature 1..121: note = Description of artificial sequence: synthetic polynucleotide sequence
  source 1..121: mol_type = other DNA
tttttgtaacaggtttgcctgccttagtggtgtcagttgttctagcgagcagaaacaacaatgaagtctatggaaaagaaagttatgggaaagaaaaaggtgatgaattgtaagtaataaa

SEQ ID NO: 522 - DNA, 285 bp, synthetic construct
  misc_feature 1..285: note = Description of artificial sequence: synthetic polynucleotide sequence
  source 1..285: mol_type = other DNA
gctgttggattcaagatccagtcatattttatgtgacctgtgctgggtattttggagtcatgttttttctgaacattgccatgttcattgtggtaatggtgcagatctgtgggaggaatggcaagagaagcaaccggaccctgagagaagaagtgttaaggaacctgcgcagtgtggttagcttgacctttctgttgggcatgacatggggttttgcattctttgcctggggacccttaaatatccccttcatgtacctcttctccatcttcaattcattacaag

SEQ ID NO: 523 - DNA, 121 bp, synthetic construct
  misc_feature 1..121: note = Description of artificial sequence: synthetic polynucleotide sequence
  source 1..121: mol_type = other DNA
tttgtcacaggcttatttatattcatcttccactgtgctatgaaggagaatgttcagaaacagtggcggcagcatctctgctgtggtagatttcggttagcagataactcaggtaaagagt

SEQ ID NO: 524 - DNA, 154 bp, synthetic construct
  misc_feature 1..154: note = Description of artificial sequence: synthetic polynucleotide sequence
  source 1..154: mol_type = other DNA
gattggagtaagacagctaccaatatcatcaagaaaagttctgataatctaggaaaatctttgtcttcaagctccattggttccaactcaacctatcttacatccaaatctaaatccagctctaccacctatttcaaaaggaatagccacacag

SEQ ID NO: 525 - DNA, 121 bp, synthetic construct
  misc_feature 1..121: note = Description of artificial sequence: synthetic polynucleotide sequence
  source 1..121: mol_type = other DNA
ttggaattgatctagatattcatatgtttatggtatagataatgtctcctatgagcattccttcaacaaaagtggatcactcaggtaaactttcgttacttttttgaatgcatgaattttt

SEQ ID NO: 526 - DNA, 180 bp, synthetic construct
  misc_feature 1..180: note = Description of artificial sequence: synthetic polynucleotide sequence
  source 1..180: mol_type = other DNA
gacagtgcttccatggacaagtccttgtcaaaactggcccatgctgatggagatcaaacatcaatcatccctgtccatcaggtcattgataaggtcaagggttattgcaatgctcattcagacaacttctataaaaatattatcatgtcagacaccttcagccacagcacaaagttttaa

SEQ ID NO: 527 - DNA, 121 bp, synthetic construct
  misc_feature 1..121: note = Description of artificial sequence: synthetic polynucleotide sequence
  source 1..121: mol_type = other DNA
taggctgtcttccgaagtgctctgtttcatcaacagccgaggagaggagggagtgctaggtggaccagatgactgcaaagcgtgaggacctcgcttctcatgctgcttagaaagcacatag

SEQ ID NO: 528 - DNA, 121 bp, synthetic construct
  misc_feature 1..121: note = Description of artificial sequence: synthetic polynucleotide sequence
  source 1..121: mol_type = other DNA
gcctctggcgaacatggcgcttgtcccctgccaggtgctgcggatggcaatcctgctgtcttactgctctatcctgtgtaactacaaggccatcgaaatgccctcacaccagacctacgga

SEQ ID NO: 529 - DNA, 121 bp, synthetic construct
  misc_feature 1..121: note = Description of artificial sequence: synthetic polynucleotide sequence
  source 1..121: mol_type = other DNA
tctgctctcatgggaaccacatccaaaccatagcagaggtcaacagagaccttggcaaaaccatttccagcagatgatgggggcagaagacaaaagggcagtggatcctcttagcccatat

SEQ ID NO: 530 - DNA, 121 bp, synthetic construct
  misc_feature 1..121: note = Description of artificial sequence: synthetic polynucleotide sequence
  source 1..121: mol_type = other DNA
taattttaattcatttatttttattattgaggaatttttaaactaagcaaggcttttaggtttgttttttctttaataggcctgacagaattgatcactgtcattaaacaagctgtgcaga

SEQ ID NO: 531 - DNA, 121 bp, synthetic construct
  misc_feature 1..121: note = Description of artificial sequence: synthetic polynucleotide sequence
  source 1..121: mol_type = other DNA
tatgacctgaaggaattcagtccccatgcagtccccgtgtggctggtctgacatcctggctggtgcagctctgcagcccttcttctttcttgcatcttcaacaccccgacacccagggctc

SEQ ID NO: 532 - DNA, 121 bp, synthetic construct
  misc_feature 1..121: note = Description of artificial sequence: synthetic polynucleotide sequence
  source 1..121: mol_type = other DNA
atgctactgaacttgatttgttagtattttattgaggatttttgcattaatgttcataagagatgtagttttcttatagcatctttgaagtcagggtatccttcaccttatggaatgaatt

SEQ ID NO: 533 - DNA, 121 bp, synthetic construct
  misc_feature 1..121: note = Description of artificial sequence: synthetic polynucleotide sequence
  source 1..121: mol_type = other DNA
aattatattcaaattttattatgatctaagaaagacatgaactttaagtagaaattaactgaagtcacatttcccttggtgaaaaattattttagatatcatttctgtctgtaagcaagta

SEQ ID NO: 534 - DNA, 121 bp, synthetic construct
  misc_feature 1..121: note = Description of artificial sequence: synthetic polynucleotide sequence
  source 1..121: mol_type = other DNA
ggcagcggccctggagagactgaggggacaggaggaggggggcgccccattggtgtgtagtcccgcgcagtcgccggctctccttttccggactctggggatctcttgctgcaactgacaa

SEQ ID NO: 535 - DNA, 121 bp, synthetic construct
  misc_feature 1..121: note = Description of artificial sequence: synthetic polynucleotide sequence
  source 1..121: mol_type = other DNA
gggcagcgtcctgcaggcaggcaaccaactgataacacaaggaactctgtcagacgaagaagaatttgagattcaggaacagatgaccctgctgaatgctagatgggaggctcttagggtg

SEQ ID NO: 536 - DNA, 121 bp, synthetic construct
  misc_feature 1..121: note = Description of artificial sequence: synthetic polynucleotide sequence
  source 1..121: mol_type = other DNA
attaaaacatcctgttgattaatttctcttttgctacatttttcatttcagctcatcctaatgtccaaaaggtggtgctagtatcatctgcgtcagatattcctgttcagtctcatcgtac

SEQ ID NO: 537 - DNA, 121 bp, synthetic construct
  misc_feature 1..121: note = Description of artificial sequence: synthetic polynucleotide sequence
  source 1..121: mol_type = other DNA
gaatgctgtcgaccaggcccgagttttcttggctgatcagccaattgaggcccctgaagagccaagaagaaacctacaatcaaaaacaggtgagactggtttctccactacatcataaaaa

SEQ ID NO: 538 - DNA, 121 bp, synthetic construct
  misc_feature 1..121: note = Description of artificial sequence: synthetic polynucleotide sequence
  source 1..121: mol_type = other DNA
atttcttttgttttctctttcagcaaatgttcccagcaggccacaggtaagagttaatggcttggttggctctatgttactgatcccaacctagagtaagcagattatccacgactgattt

SEQ ID NO: 539 - DNA, 121 bp, synthetic construct
  misc_feature 1..121: note = Description of artificial sequence: synthetic polynucleotide sequence
  source 1..121: mol_type = other DNA
cttgaggtctttaaaatattttttacatttttgggccttactttcataaactagggaacctttaaagccaaatagtaggccaattttttccaagaactttcttgcctccataaagtcaatc

SEQ ID NO: 540 - DNA, 121 bp, synthetic construct
  misc_feature 1..121: note = Description of artificial sequence: synthetic polynucleotide sequence
  source 1..121: mol_type = other DNA
ctccttcccctacttatttctcaagcataagttcctctttttatgtatattgtcttttggtgagcacattttttgaattctgtgtgacctttcctatgtacgaaatggtatatacaagtat

SEQ ID NO: 541 - DNA, 121 bp, synthetic construct
  misc_feature 1..121: note = Description of artificial sequence: synthetic polynucleotide sequence
  source 1..121: mol_type = other DNA
ccagggtctcacctccttggcaggattacttttttctctctctctctggaaaccttgatcctgccaaaagctcctcttgccttttgagcctcttatcacttcttctgcttggttgcttgga

SEQ ID NO: 542 - DNA, 121 bp, synthetic construct
  misc_feature 1..121: note = Description of artificial sequence: synthetic polynucleotide sequence
  source 1..121: mol_type = other DNA
ggcttggtggcctgcaatattaaaatagaagtctgttgtgtgcttcatttcattggtgtgcccagtggcctcaatccagtgtcctattgggagacaatacacaccatccaccaagttgttt

SEQ ID NO: 543 - DNA, 121 bp, synthetic construct
  misc_feature 1..121: note = Description of artificial sequence: synthetic polynucleotide sequence
  source 1..121: mol_type = other DNA
ttttatgagtgatcttatcataagaaaagtacacattacctctcttaattcccttgcatcatcagatatagatactatttgggacaaaaaataaatgttttattaggagtgtaaaattaag

SEQ ID NO: 544 - DNA, 121 bp, synthetic construct
  misc_feature 1..121: note = Description of artificial sequence: synthetic polynucleotide sequence
  source 1..121: mol_type = other DNA
aagaccactgtgaattctggttcaaatacaaacatgagctatgtgtaccaccattgctaacgcacacacagacagatacatgcaacacctctattccttccaaattttatttggatggggc

SEQ ID NO: 545 - DNA, 121 bp, synthetic construct
  misc_feature 1..121: note = Description of artificial sequence: synthetic polynucleotide sequence
  source 1..121: mol_type = other DNA
atatatattacatataatttcttataaagaattgacttacgtaattataaaagttaagaagttccatgttccgctatctacgagctggatacccaagaaagctggcagtatagttctgaga

SEQ ID NO: 546 - DNA, 121 bp, synthetic construct
  misc_feature 1..121: note = Description of artificial sequence: synthetic polynucleotide sequence
  source 1..121: mol_type = other DNA
ccgcctctctgtgcacgtgaagaccaatgagacggcctgcaaccaaacagccgtcatcaagcccctcactaaaagttaccaaggctctggcaagagcctgaccttttcagataccagcacc

SEQ ID NO: 547 - DNA, 121 bp, synthetic construct
  misc_feature 1..121: note = Description of artificial sequence: synthetic polynucleotide sequence
  source 1..121: mol_type = other DNA
tcctgaaagaaatattgcctgagtttaagctgtcagatgaggccagctctgaaagcaaaatagcagtgttagattctaaattaaaagaaccagggaaagaagggaaggagggaaaagaaat

SEQ ID NO: 548 - DNA, 121 bp, synthetic construct
  misc_feature 1..121: note = Description of artificial sequence: synthetic polynucleotide sequence
  source 1..121: mol_type = other DNA
ttcaagtagctgaagcatactgggcttgctgccacttactctaacctgttacagtgatctttggacataaaagttttgtctgtttcattctaaaatcaacaacatgaggtattgcagagcc

SEQ ID NO: 549 - DNA, 121 bp, synthetic construct
  misc_feature 1..121: note = Description of artificial sequence: synthetic polynucleotide sequence
  source 1..121: mol_type = other DNA
ctggaagaacaaataataacctagaaactgaaaagtaagattcaagcatctttcatctaatgtgatctgttttgcgaaccattataagtcaatggcttgagctttttttttttaattttca

SEQ ID NO: 550 - DNA, 121 bp, synthetic construct
  misc_feature 1..121: note = Description of artificial sequence: synthetic polynucleotide sequence
  source 1..121: mol_type = other DNA
cgctcttcatttctgtgaaacgtttactcgaaagacggactcgtccccttccccttgtctatgggttggaacaacgctaggaacagtgcttgtcattgcactgaaccttcccccaggggga

SEQ ID NO: 551 - DNA, 121 bp, synthetic construct
  misc_feature 1..121: note = Description of artificial sequence: synthetic polynucleotide sequence
  source 1..121: mol_type = other DNA
gtgccatttgggcgctgggaaggtgctcggcggcggggttcccggtcccaccatgtgcaccaacatagtttacgagtggctcaaagcgctgcagcttccgcagtacgcggagtccttcgtg

SEQ ID NO: 552 - DNA, 121 bp, synthetic construct
  misc_feature 1..121: note = Description of artificial sequence: synthetic polynucleotide sequence
  source 1..121: mol_type = other DNA
ccgtttgggtttcggtactatgcaggttaacaaagccaggaaggctctcctcttcctccttcagtttgtgctccagtctcttcacggagtctatactgctactgcattcgcccagcagttt

SEQ ID NO: 553 - DNA, 171 bp, synthetic construct
  misc_feature 1..171: note = Description of artificial sequence: synthetic polynucleotide sequence
  source 1..171: mol_type = other DNA
acctggctgcaatgaggtccaggagatgctgccaccggtcgttgacctttcccagcttgtattcaatctcagatgctttgctttcatggctggctttagcaagtcgttctcccatttgttggagctgtattttgttctcttgagcaatagcaatttcctcttgataatcct

SEQ ID NO: 554 - DNA, 145 bp, synthetic construct
  misc_feature 1..145: note = Description of artificial sequence: synthetic polynucleotide sequence
  source 1..145: mol_type = other DNA
acctggttaacagaagcatctgtattagccacaggtgaaggggagcgacaggcaggtggagaggaaatctcactgttggttccctcctccccagactcctcagtgaccggtgacagcaaagtgtgacagcgacctgcagtcatct

SEQ ID NO: 555 - DNA, 121 bp, synthetic construct
  misc_feature 1..121: note = Description of artificial sequence: synthetic polynucleotide sequence
  source 1..121: mol_type = other DNA
aatgcttacctgaaggtctggcggtgtttctagatttttagttaattctttcagatcattaactttggaatgcagttcttccaatctcaatgctttgtttttaacttcagactgccaaaag

SEQ ID NO: 556 - DNA, 121 bp, synthetic construct
  misc_feature 1..121: note = Description of artificial sequence: synthetic polynucleotide sequence
  source 1..121: mol_type = other DNA
tgacgcggacctggtggagctcaagcgggagctggaagccgtcggggagttccgccaccgttctccgagcaggtctctgtcggtccccaaccggcctcggccacctcaacccccgcagaga

SEQ ID NO: 557 - DNA, 121 bp, synthetic construct
  misc_feature 1..121: note = Description of artificial sequence: synthetic polynucleotide sequence
  source 1..121: mol_type = other DNA
ctccaagtaagactctgcttgctttcagctccctggatgcctgccaggaataaccgcgcgttccctgctactgaaaacacggctccgaatccacttctccccggccttccggtccccacag

SEQ ID NO: 558 - DNA, 121 bp, synthetic construct
  misc_feature 1..121: note = Description of artificial sequence: synthetic polynucleotide sequence
  source 1..121: mol_type = other DNA
ttttttttctcagtttaattttgttgggagaatccttggacctagaggacttacagccaaacaacttgaagcagaaaccggatgtaaaatcatggtccgaggcaaaggctcaatgagggat

SEQ ID NO: 559 - DNA, 121 bp, synthetic construct
  misc_feature 1..121: note = Description of artificial sequence: synthetic polynucleotide sequence
  source 1..121: mol_type = other DNA
aggtaagtccttgaaaatggactaagtctttatgtgagtaacttactatacttttacatcgtaataataaaatttccagatttttttgtgcttaaaacactatattccaggccgggcgcgg

SEQ ID NO: 560 - DNA, 206 bp, synthetic construct
  misc_feature 1..206: note = Description of artificial sequence: synthetic polynucleotide sequence
  source 1..206: mol_type = other DNA
ctcacagctggtcctcgtccacccagatggtcttgcgctgctcctcgccgatcttgtccttgacaacgcggagcagctcctctacgctgccccacatgtcaggttccaccgtggcgtacaggcacggcagggcctccagctccttctccttcagccggcacacgcgcaggaactcctcctccgtctcaggtcggggcagcagcttt

SEQ ID NO: 561 - DNA, 121 bp, synthetic construct
  misc_feature 1..121: note = Description of artificial sequence: synthetic polynucleotide sequence
  source 1..121: mol_type = other DNA
tacctgaacctcttgatgttcttctcacacacccggatgaagagcacgatggggtagatgttggacttgatcaagtctcttgtgcagccgatcccagcctccagcaggcagtgcttgttct

SEQ ID NO: 562 - DNA, 121 bp, synthetic construct
  misc_feature 1..121: note = Description of artificial sequence: synthetic polynucleotide sequence
  source 1..121: mol_type = other DNA
tggcggccacagcttcaatgttggcaggggcgatgcattcgaacgcgttggggttcttctctcgggagtagatgatggtctccgtcttctgccttctgaggaactcatctcttgtgacgat

SEQ ID NO: 563 - DNA, 181 bp, synthetic construct
  misc_feature 1..181: note = Description of artificial sequence: synthetic polynucleotide sequence
  source 1..181: mol_type = other DNA
cctgacttgcagatggtgaactccatggcacctcccgagttgagcagcctctgcaccagcgtcttggccagcacggtgggtgtgaagagcacgggccggcggcgctcgcagtagaaggcgcgtaccaggctgtaggggatgaggctgaggttcttgcccagctcgctctcagggtccagct

SEQ ID NO: 564 - DNA, 137 bp, synthetic construct
  misc_feature 1..137: note = Description of artificial sequence: synthetic polynucleotide sequence
  source 1..137: mol_type = other DNA
ccttcctgcttctcagtcaagagcttggtggcgtccagcgaggaccgggccaggctccctagcggactccccgagatgatgcggacccgctcgttgctgttcatccgcttatacttgttctcggacctgctgacgaa

SEQ ID NO: 565 - DNA, 121 bp, synthetic construct
  misc_feature 1..121: note = Description of artificial sequence: synthetic polynucleotide sequence
  source 1..121: mol_type = other DNA
cggagagccttacctgaaggagctggccaaaaaggaagcttgctcgcgagagacgggggctgacccgggggtcgcttgttgaaagcgcttcttctggctgcagggtgttctgaaatgaatt

SEQ ID NO: 566 - DNA, 121 bp, synthetic construct
  misc_feature 1..121: note = Description of artificial sequence: synthetic polynucleotide sequence
  source 1..121: mol_type = other DNA
tggcagacctacccggagtgcccgcagggtgtggtgggtgccgtctacctcctcccggctgcctcggtgcatcaggcgctgcagtttcaccaggaggagctgctgggctctggggagcgaa

SEQ ID NO: 567 - DNA, 121 bp, synthetic construct
  misc_feature 1..121: note = Description of artificial sequence: synthetic polynucleotide sequence
  source 1..121: mol_type = other DNA
ccggctgtagctgggtatggtgcccatatccaggtcatggtctgtgaaagggtcgacccgcgcgcacagccactcgtgcctgtcctggtacatggtgtcacggacgtgcacaacatcgtca

SEQ ID NO: 568 - DNA, 121 bp, synthetic construct
  misc_feature 1..121: note = Description of artificial sequence: synthetic polynucleotide sequence
  source 1..121: mol_type = other DNA
cacttcagggacatggtgcaggcgtccagctggctggagatgttcaggttcagccggatgtagaacgagtcccccgatgtgatcaggccgtcctccatgtccttcaccagcttccggtacc

SEQ ID NO: 569 - DNA, 121 bp, synthetic construct
  misc_feature 1..121: note = Description of artificial sequence: synthetic polynucleotide sequence
  source 1..121: mol_type = other DNA
cgtggttgaccttgtagtgcagcgtgacggggccgctgcacctctggatggtccagtgggcttcctctttggtgcatgtgtccaacgggacactctgcctctcgcctcggatgcagccttc

SEQ ID NO: 570 - DNA, 203 bp, synthetic construct
  misc_feature 1..203: note = Description of artificial sequence: synthetic polynucleotide sequence
  source 1..203: mol_type = other DNA
ccagcagcagctggtggccctcacggaggccggctttctcggccagagagccaggcttgaccgagtgcacgaagctccctcgcgcgttgccccccagcagggtgagctgggaggtgaggctgtcgccattcagcgtcgtgtgctgcaccgagggccctgggccccgcacgtgccccacagaggtgaccgaaggccggaagggt

SEQ ID NO: 571 - DNA, 134 bp, synthetic construct
  misc_feature 1..134: note = Description of artificial sequence: synthetic polynucleotide sequence
  source 1..134: mol_type = other DNA
cctttccagagagaacttcctgaacatgaggttgacctgctccaggtcgtaggcatccaggccctcggattggtgggaggaggaggaggagtggatggaggagggtccgaaggagtagcgttcgtgactgtcat

SEQ ID NO: 572 - DNA, 121 bp, synthetic construct
  misc_feature 1..121: note = Description of artificial sequence: synthetic polynucleotide sequence
  source 1..121: mol_type = other DNA
acccaggaccctcccggatctgagaggcacgtaccatccagatctaaggcgtcaaacccgccgctgtcattgtcttcttcgactgtgctgcaagacacaagggaggtgggggaaagcatgc

SEQ ID NO: 573 - DNA, 121 bp, synthetic construct
  misc_feature 1..121: note = Description of artificial sequence: synthetic polynucleotide sequence
  source 1..121: mol_type = other DNA
tgccacccacctgcgatggggcgcgtcctccttgtagcgtctgacgatggagtcgtttcccgggggctcggcggtgattgacatgatgctgctgcggctccgggggggctgcttcagacac

SEQ ID NO: 574 - DNA, 121 bp, synthetic construct
  misc_feature 1..121: note = Description of artificial sequence: synthetic polynucleotide sequence
  source 1..121: mol_type = other DNA
ggcagaggctgcagctcaccatcttggtgaaggagttggtgatgggcagagatccgcaggagctagggctggcgtccgtgccttcttcctcgtgccccttggctgtcctcacgggagacga

SEQ ID NO: 575 - DNA, 121 bp, synthetic construct
  misc_feature 1..121: note = Description of artificial sequence: synthetic polynucleotide sequence
  source 1..121: mol_type = other DNA
agacaggccaagagagatttgggcgtctcactaaccttgaaaatctgatgttcgcttcaggctgatgggggatttggctctctgcagctaaaagggaggggaggggaagaaacaagacaca

SEQ ID NO: 576 - DNA, 178 bp, synthetic construct
  misc_feature 1..178: note = Description of artificial sequence: synthetic polynucleotide sequence
  source 1..178: mol_type = other DNA
cctggatgcccttcaggttcatcctgcgctggggcggatggtagggcaggaagtacttgctgtcttcaggtgactcctccgaggtggaagaatcgtcagcttcttgaccattggtcctggggctggcatccccaaagtcctgagagatgatggttactggcaggttcctgggcagact

SEQ ID NO: 577 - DNA, 199 bp, synthetic construct
  misc_feature 1..199: note = Description of artificial sequence: synthetic polynucleotide sequence
  source 1..199: mol_type = other DNA
cctggtccaggttgttgctgtccttggagaggcgccgcagcttgctctccaggttgacgatgcaggcctcccgccgcaccatctcgatcctcatctcgtcgttcttctcctccagctcgcggatctgcttcctgtacttgtccttttcgattaagcactgcgagtactgtgtctgagcttcatctcgggagtggaaggc

SEQ ID NO: 578 - DNA, 121 bp, synthetic construct
  misc_feature 1..121: note = Description of artificial sequence: synthetic polynucleotide sequence
  source 1..121: mol_type = other DNA
ggtcccgctcccgctccacctcctccagctgcagcatgaccgtgttcatgcggtgcttgtacatttcacagtcctttcccagggtcgagcacttgagctccaggtcctccttctcctccag

SEQ ID NO: 579 - DNA, 154 bp, synthetic construct
  misc_feature 1..154: note = Description of artificial sequence: synthetic polynucleotide sequence
  source 1..154: mol_type = other DNA
ccttgtctcgcagctcctctgcctggcgggcctcctcctgcaggttgtagatcctgttgaccagctcctgcctgtcctccagggcctccttgcggtcgtgttccaagatgtccaggatggccttgtctgagtctggcaggctgcgcttcccggc

SEQ ID NO: 580 - DNA, 181 bp, synthetic construct
  misc_feature 1..181: note = Description of artificial sequence: synthetic polynucleotide sequence
  source 1..181: mol_type = other DNA
cctggatgatggactgcagctcctggtttttggtcttcagcatttcattctcccgctccagttccagaacctgctccttcttgggccgattttcaatgtcattcttcagttttagagactgatttctctccagcttacattcctcctccatcttattcaaccggtgctttagctgatcgat

SEQ ID NO: 581 - DNA, 327 bp, synthetic construct
  misc_feature 1..327: note = Description of artificial sequence: synthetic polynucleotide sequence
  source 1..327: mol_type = other DNA
cctcgagttggaggtctcggctcctcatgaccgccatgttcttctcctcactgagctgtgcgtagcgcatggctaagttgtagttgtcgtccttcaccttgaccagctcgtcattgtagctgtcccgctcttccttcatcttgtagtaccgctcctggaaggttagcagctccacgcgcgtcagcgtcatctgcttcttctcatcctccagctgccgcaacctggccagcagctcgcagcgttgcaggtccttggccttcatctgctgctgcagcttgatgacctcgttcatcaggaagtgcgtgaggccctcgtggccttcctcca

SEQ ID NO: 582 - DNA, 139 bp, synthetic construct
  misc_feature 1..139: note = Description of artificial sequence: synthetic polynucleotide sequence
  source 1..139: mol_type = other DNA
cccacaatggtggagaatctccgagtgggctctttcccagtcaccagtttgtacagttctgggtaataaaattctaggctctccaagaagaccacatagcccctttgccccttggtatgtagaatgtccaacagccggc

SEQ ID NO: 583 - DNA, 214 bp, synthetic construct
  misc_feature 1..214: note = Description of artificial sequence: synthetic polynucleotide sequence
  source 1..214: mol_type = other DNA
cctgctcggttgatcttggatggcagcataggggcattaagcacttcatcttcatcctgctcatcaatgaccttacactgacgcaggtagggcgtgagcttggcagggttgatatagcggctgagcatgtgccggttacactccacattctcccacaaggcgtcctcttcatccttcagcgtctccatgtagtcatccatctctggccctcctc

SEQ ID NO: 584 - DNA, 121 bp, synthetic construct
  misc_feature 1..121: note = Description of artificial sequence: synthetic polynucleotide sequence
  source 1..121: mol_type = other DNA
accctgtctctccataatatatagagaggtatagaggggataacagatgccgagtacctggcatggaggggtgctcacacacaggggctgctatcccgccattggggtgtgacttctacac

SEQ ID NO: 585 - DNA, 145 bp, synthetic construct
  misc_feature 1..145: note = Description of artificial sequence: synthetic polynucleotide sequence
  source 1..145: mol_type = other DNA
cctagaagcatttgcggtggacgatggaggggccggactcgtcatactcctgcttgctgatccacatctgctggaaggtggacagcgaggccaggatggagccgccgatccacacggagtacttgcgctcaggaggagcaatgat

SEQ ID NO: 586 - DNA, 183 bp, synthetic construct
  misc_feature 1..183: note = Description of artificial sequence: synthetic polynucleotide sequence
  source 1..183: mol_type = other DNA
ccttgatcttcattgtgctgggtgccagggcagtgatctccttctgcatcctgtcggcaatgccagggtacatggtggtgccgccagacagcactgtgttggcgtacaggtctttgcggatgtccacgtcacacttcatgatggagttgaaggtagtttcgtggatgccacaggactccatgc

SEQ ID NO: 587 - DNA, 440 bp, synthetic construct
  misc_feature 1..440: note = Description of artificial sequence: synthetic polynucleotide sequence
  source 1..440: mol_type = other DNA
cccaggaaggaaggctggaagagtgcctcagggcagcggaaccgctcattgccaatggtgatgacctggccgtcaggcagctcgtagctcttctccagggaggagctggaagcagccgtggccatctcttgctcgaagtccagggcgacgtagcacagcttctccttaatgtcacgcacgatttcccgctcggccgtggtggtgaagctgtagccgcgctcggtgaggatcttcatgaggtagtcagtcaggtcccggccagccaggtccagacgcaggatggcatgggggagggcatacccctcgtagatgggcacagtgtgggtgaccccgtcaccggagtccatcacgatgccagtggtacggccagaggcgtacagggatagcacagcctggatagcaacgtacatggctggggtgttgaaggtctcaaacatgat

SEQ ID NO: 588 - DNA, 241 bp, synthetic construct
  misc_feature 1..241: note = Description of artificial sequence: synthetic polynucleotide sequence
  source 1..241: mol_type = other DNA
cctgggtcatcttctcgcggttggccttggggttcaggggggcctcggtcagcagcacggggtgctcctcgggagccacacgcagctcattgtagaaggtgtggtgccagattttctccatgtcgtcccagttggtgacgatgccgtgctcgatggggtacttcagggtgaggatgcctctcttgctctgggcctcgtcgcccacataggaatccttctgacccatgcccaccatcacgcc

SEQ ID NO: 589 - DNA, 121 bp, synthetic construct
  misc_feature 1..121: note = Description of artificial sequence: synthetic polynucleotide sequence
  source 1..121: mol_type = other DNA
tggtgcctggggcgccccacgatggaggggaagacggcccggggggcatcgtcgcccgcgaagccggccttgcacatgccggagccgttgtcgacgacgagcgcggcgatatcatcatcca

SEQ ID NO: 590 - DNA, 145 bp, synthetic construct
  misc_feature 1..145: note = Description of artificial sequence: synthetic polynucleotide sequence
  source 1..145: mol_type = other DNA
gtcagttctgagaaatgacacccaggttggcgatgtgtctcatggttggccttccatggggacagttccaggggtggtccatctcccccatgtgggtgatcagtttcttcatctcgcttgtgttaagagcagtcccaatcatcac

SEQ ID NO: 591 - DNA, 171 bp, synthetic construct
  misc_feature 1..171: note = Description of artificial sequence: synthetic polynucleotide sequence
  source 1..171: mol_type = other DNA
ccgacttccggcaggctctggaggcaaacatctgcttgactcgggaaggccggcacatgaccccagggctgtcgctcagcatgaagatcagttcatcgacgtcctggggtccgaaggtccagtttttactagttggcaaggaaatcagtttagccctttcagtgactggag

SEQ ID NO: 592 - DNA, 121 bp, synthetic construct
  misc_feature 1..121: note = Description of artificial sequence: synthetic polynucleotide sequence
  source 1..121: mol_type = other DNA
aataacttaccattttcatcgataacaaaatcaaagccattctttctaaatatttccagattttctatcagaacagcttcattaacagcagttaagttgagagtctgaggtctgaaaaaca

SEQ ID NO: 593 - DNA, 169 bp, synthetic construct
  misc_feature 1..169: note = Description of artificial sequence: synthetic polynucleotide sequence
  source 1..169: mol_type = other DNA
cgctatgagcctctgcccctggagcacggtgtgctgctgcagcatctcgaagttatacttctcgtccgtggcatgctggtccactatgaagatatcctcattcagtttggttattataaatcccaggttaaactgaccaatgatttccatttctgcaaacatcgtttta

SEQ ID NO: 594 - DNA, 424 bp, synthetic construct
  misc_feature 1..424: note = Description of artificial sequence: synthetic polynucleotide sequence
  source 1..424: mol_type = other DNA
ccttatctcttttcttagttcatcttcggctgcttgattttctccaggacaaatctttgccctaaacttcctgtaattctgttccccttcactttgctgtgcttcatgatgtaactgctttattcgtttagctaaagaactcatagaaaagtccaggggcacaactttcttattaattttcacagctacatcaacctgagaggctgacatgtcctgagtatttactaacttttgacaaatgtcagaactggaaagaatttcttcttttttaaaacgctttgtgtttggggttgcgagattagttggctgaggcaaaactcgaaatttacatccggtatcttcctggtttgaatggcagtccacatctgaaaaagagtcgtcagttttaggcgctttctcctgagagtccacatgttcctgcgag

SEQ ID NO: 595 - DNA, 439 bp, synthetic construct
  misc_feature 1..439: note = Description of artificial sequence: synthetic polynucleotide sequence
  source 1..439: mol_type = other DNA
cccctgtcccctggggagctggccgcatactcgctgctgcagtgactgcccgtgtctgggatgctgaacccctcagaatccacggaagtgctgccgtgccccgagtccttctccacctccgctctgtccgtagggtcactgggtccgtgactggaactcactgcctctttctgaggtctcaggacgcctttgtcagagatggcacctgaagtgctagaagacagcataccccttttctgtcctagagggctccttcttggttctggagtctttgggctgtgaggcttgttctctgttgtgtgacgaagagaaaaggcctctcgcagtctggaaatggacacgtcttttttttcttctccagtccttaatgaaggggattgatcctgcttttctaccatgggcttttccaaatccgctgcatgcatttttattaagttac

SEQ ID NO: 596 - DNA, 157 bp, synthetic construct
  misc_feature 1..157: note = Description of artificial sequence: synthetic polynucleotide sequence
  source 1..157: mol_type = other DNA
ccttcaacatccagcagtggctgctgactgacatttagcttgttgacatcactatcaaacattcctatcaaagaggtctttaaaactgccaacaaaagcttttcctcttgtagcaaaatttgccttttatctggagtaacattgatatcaacgcatt

SEQ ID NO: 597 - DNA, 121 bp, synthetic construct
  misc_feature 1..121: note = Description of artificial sequence: synthetic polynucleotide sequence
  source 1..121: mol_type = other DNA
aatgccaatggaacttacctgaatcaacagaaatgttaagaacaacaaatggatactggtgtcgattatacatgtggtagacctcattcacgagtctgcagacctgcacaaaatacaagga

SEQ ID NO: 598 - DNA, 121 bp, synthetic construct
  misc_feature 1..121: note = Description of artificial sequence: synthetic polynucleotide sequence
  source 1..121: mol_type = other DNA
attttaaatacctttgctgggtcacaaggccgccggttgataaagaaaaactgtctgtctgttgaactccttccaactccatgcgtgcattgtgaaatgaaacctgagatgctattcaaca

SEQ ID NO: 599 - DNA, 121 bp, synthetic construct
  misc_feature 1..121: note = Description of artificial sequence: synthetic polynucleotide sequence
  source 1..121: mol_type = other DNA
caatctacttactaaaaaagattatgcagagcatcggaacagctcaaaccgtactcttcacacacggagtcactagggggcagctgaacaaaaggaatgaggctttgcaactgaaaaaaaa

SEQ ID NO: 600 - DNA, 169 bp, synthetic construct
  misc_feature 1..169: note = Description of artificial sequence: synthetic polynucleotide sequence
  source 1..169: mol_type = other DNA
cctgcttctgcccaaacacagagccgatattttcctttatgctggggcttccacctgtgcataccacaggctgtcgttttccttgtccaagctgattggtgcaacttacacggatgcctgctgaaatgatacagtatgcatgtaagacctggaccattttggcatactc

SEQ ID NO: 601 - DNA, 185 bp, synthetic construct
  misc_feature 1..185: note = Description of artificial sequence: synthetic polynucleotide sequence
  source 1..185: mol_type = other DNA
ccttcttaatattcctttgaaattccttatggcgcacaggtagtgtggaaaataactgctgcacgctgactgtggtccctctggggcgggggtagggggttttctggataattttcccattgtgatcaaacatcagtcgagttccaaccttcgccgatgcgtggcaggtagaaatggtgacatcg

SEQ ID NO: 602 - DNA, 121 bp, synthetic construct
  misc_feature 1..121: note = Description of artificial sequence: synthetic polynucleotide sequence
  source 1..121: mol_type = other DNA
ttgtatcacctcagtgcacaaagtgagctcagagcttccccccgaaagccaaaagtttcaacctgagttaggtcggcaaactcttgaatcttagatgtgtgatgtttcagagctgaaagag

SEQ ID NO: 603 - DNA, 121 bp, synthetic construct
  misc_feature 1..121: note = Description of artificial sequence: synthetic polynucleotide sequence
  source 1..121: mol_type = other DNA
agaaaaagtcaacttacttaagccttcgaagttttcttcttctaccccacatccattgtctgaaacttcaataagatccactccatagtccttaagctttagatctagaaagtttaaaata

SEQ ID NO: 604 - DNA, 141 bp, synthetic construct
  misc_feature 1..141: note = Description of artificial sequence: synthetic polynucleotide sequence
  source 1..141: mol_type = other DNA
ccaatattagtggcaccagcatccagactgttttctactaactcctttaccgcagtgcttagactcagtaccacctgcccagagcaaatctgatggactgacttccgatcaataggtttgatggccttagcaggttctgta

SEQ ID NO: 605 - DNA, 121 bp, synthetic construct
  misc_feature 1..121: note = Description of artificial sequence: synthetic polynucleotide sequence
  source 1..121: mol_type = other DNA
aaagagggcgcgcgagaggggacaccggaagactgcgagccccgctcacctcgagctctcagctcgctccatggatgcaacacccgatccgcctcggggactgggaaagttccctccaggg

SEQ ID NO: 606 - DNA, 121 bp, synthetic construct
  misc_feature 1..121: note = Description of artificial sequence: synthetic polynucleotide sequence
  source 1..121: mol_type = other DNA
tcattgcaacaaacattattttgttacctggtatgttgctagcatgtgagacaagagattgcatctgctcgctccaagaagatccactttttgacaaacatccatcttcaatttgtcaaag

SEQ ID NO: 607 - DNA, 121 bp, synthetic construct
  misc_feature 1..121: note = Description of artificial sequence: synthetic polynucleotide sequence
  source 1..121: mol_type = other DNA
tgcaaggcgcacttgtgtttgtacctatgaaaataaagaggaatttctgaatcaccctaacccttaagtaggtaaaatttgcaggtgaaatgagaccaacagcaggccttttctctttcac

SEQ ID NO: 608 - DNA, 209 bp, synthetic construct
  misc_feature 1..209: note = Description of artificial sequence: synthetic polynucleotide sequence
  source 1..209: mol_type = other DNA
agacagttctcgttcacacaacagagacagctcgtcttagatatttcatggagttgttgcttgagaaaggaaaacctctaatgctagtaggaaatgcaggagtgggaaaaacagtctttgtaggtgacacattggcaagtctctctgaggattacatagtatcccgtgtgcctttcaactactacacgacatccacagctctgcaaagt

SEQ ID NO: 609 - DNA, 121 bp, synthetic construct
  misc_feature 1..121: note = Description of artificial sequence: synthetic polynucleotide sequence
  source 1..121: mol_type = other DNA
ccagcaaggcccataaaggaatgaagacataggatagattcatggtagtaaactgttccagtttagcacagagtgcgaggcagaaggctaatttaagtaacattgcaatgaggtaccaggc

SEQ ID NO: 610 - DNA, 121 bp, synthetic construct
  misc_feature 1..121: note = Description of artificial sequence: synthetic polynucleotide sequence
  source 1..121: mol_type = other DNA
taatattgtgtgatccatgtcgagggtcaaagccagacttacaccgcccagccattttcacaatcagcaggacaagaaggatagtatcaaatatccagactggaatgaatatgaggaacca

SEQ ID NO: 611 - DNA, 150 bp, synthetic construct
  misc_feature 1..150: note = Description of artificial sequence: synthetic polynucleotide sequence
  source 1..150: mol_type = other DNA
acctgaagagaatgtcctgcaggacttagactgaatcgaaaagtttcattaaacgaaggctctcgatcatgtctgcatactcttgtttttttcttgatcacctttttttgggtagaaatattcatcacatatattttcacatataaatct

SEQ ID NO: 612 - DNA, 121 bp, synthetic construct
  misc_feature 1..121: note = Description of artificial sequence: synthetic polynucleotide sequence
  source 1..121: mol_type = other DNA
ggaagtggctccagttgcccctccatgctcaacttagcctctccccgccctcccaggtgtgcgagctggacatcatcttcaactttgagaaggcctacttcatcctggatgagtttttgat

SEQ ID NO: 613 - DNA, 121 bp, synthetic construct
  misc_feature 1..121: note = Description of artificial sequence: synthetic polynucleotide sequence
  source 1..121: mol_type = other DNA
gatgtccaggacacctccaagaagagtgtgctgaaagccatcgagcaggctgacctactgcaagaggtacgggccagggacagtgaggaggaggaggaagcgcacagtggcggacagggtc

SEQ ID NO: 614 - DNA, 121 bp, synthetic construct
  misc_feature 1..121: note = Description of artificial sequence: synthetic polynucleotide sequence
  source 1..121: mol_type = other DNA
ccgctcactccgtctcaatatgtctcaagatggcggccaatgtgggatcgatgtttcaatattggaagcgctttgatttacagcagctgcaggtcaggctcctccgcgctcggcctcgcgc

SEQ ID NO: 615 - DNA, 121 bp, synthetic construct
  misc_feature 1..121: note = Description of artificial sequence: synthetic polynucleotide sequence
  source 1..121: mol_type = other DNA
ctcggcgcccgcggcgccgggacagccccgggactctgccaggtggatgttgtgcgtagccggagccaggttgaaggtgagcggcgtgtgggccagaagtcccgaggttgcaggcgcggag

SEQ ID NO: 616 - DNA, 121 bp, synthetic construct
  misc_feature 1..121: note = Description of artificial sequence: synthetic polynucleotide sequence
  source 1..121: mol_type = other DNA
aacagagagaactcgatgccaccgcaacggtattggcgaaccggcaggatgaaagtgagcagtccagaaagcggcttatcgaacagagccgggagttcaagaagaacactccagaggtgag

SEQ ID NO: 617 - DNA, 121 bp, synthetic construct
  misc_feature 1..121: note = Description of artificial sequence: synthetic polynucleotide sequence
  source 1..121: mol_type = other DNA
caaatggctgcttcctgacctccgcctcctgctccaggatttgcgcaagcaggtagcgccgctgctgaagagtttccaaggagaggtaagcttttctattcattttctatcctgagccacc

SEQ ID NO: 618 - DNA, 121 bp, synthetic construct
  misc_feature 1..121: note = Description of artificial sequence: synthetic polynucleotide sequence
  source 1..121: mol_type = other DNA
ctttctttccttccctttcagattgatgcactgagtaaaagaagcaaggaagctgaagcagctttcttgaatgtctacaaaagattgattgacgtcccaggtaagccccggcagtaatggc

SEQ ID NO: 619 - DNA, 139 bp, synthetic construct
  misc_feature 1..139: note = Description of artificial sequence: synthetic polynucleotide sequence
  source 1..139: mol_type = other DNA
gatcccgtaccagctttggatctcggacagcaactccagctcaaagtgcagcgcctgcacgatattgaaacagagaaccagaaacttagggaaactctggaagaatacaacaaggaatttgctgaagtgaaaaatcaag

SEQ ID NO: 620 - DNA, 121 bp, synthetic construct
  misc_feature 1..121: note = Description of artificial sequence: synthetic polynucleotide sequence
  source 1..121: mol_type = other DNA
ggttacgataaaagcacttaaagagaaaatccgagaatatgaacagacactgaagaaccaagccgaaaccatagctcttgagaaggaacagaagttacagaatgactttgcagaaaaggag

SEQ ID NO: 621 - DNA, 121 bp, synthetic construct
  misc_feature 1..121: note = Description of artificial sequence: synthetic polynucleotide sequence
  source 1..121: mol_type = other DNA
gcttcgtcctcttcctttgcagaaagctgcaggagacacagatgtccaccacctcaaagctggaggaagctgagcataaggttcagagcctacaaacaggtttgatactctccttcctagt

SEQ ID NO: 622 - DNA, 121 bp, synthetic construct
  misc_feature 1..121: note = Description of artificial sequence: synthetic polynucleotide sequence
  source 1..121: mol_type = other DNA
aatagttagtaattctttgcctttcagccctggaaaaaactcgaacagaattatttgacctgaaaaccaaatacgatgaagaaactactgcaaagtaagtctctctgcttggcctccctta

SEQ ID NO: 623 - DNA, 121 bp, synthetic construct
  misc_feature 1..121: note = Description of artificial sequence: synthetic polynucleotide sequence
  source 1..121: mol_type = other DNA
tgtgactaacctgctctctccctctcaccctcctagggccgacgagattgaaatgatcatgacggaccttgaaagggcaaaccaggtaggaccctggacgcttttagtcctaaaacccaca

SEQ ID NO: 624 - DNA, 121 bp, synthetic construct
  misc_feature 1..121: note = Description of artificial sequence: synthetic polynucleotide sequence
  source 1..121: mol_type = other DNA
tccttcagagggcagaggtggctcagagagaggcggagaccttaagggaacagctctcatcggccaatcactccctccagctggcctcacagatccagaaggcaccagacgtggtgggtag

SEQ ID NO: 625 - DNA, 190 bp, synthetic construct
  misc_feature 1..190: note = Description of artificial sequence: synthetic polynucleotide sequence
  source 1..190: mol_type = other DNA
ggagcaggccatagaggtgctgacccgctccagcctagaagttgagttggccgccaaggagcgggagatcgcacagctggtggaggacgtgcagagactccaggccagcctcaccaagctgcgggagaattcggccagccagatctcacagcttgagcagcagctgagcgccaaaaacagcacactcaaa

SEQ ID NO: 626 - DNA, 121 bp, synthetic construct
  misc_feature 1..121: note = Description of artificial sequence: synthetic polynucleotide sequence
  source 1..121: mol_type = other DNA
ggccactgatcaaattcttctctgttttcagcaactggaagaaaaactcaaaggccaggctgactatgaagaggtgaagaaagagctgaagtaagtacggagagccctgtggcccctcaca

SEQ ID NO: 627 - DNA, 121 bp, synthetic construct
  misc_feature 1..121: note = Description of artificial sequence: synthetic polynucleotide sequence
  source 1..121: mol_type = other DNA
aataaataaaataacccctctgttgtgctcttgcagcattctgaagtccatggagtttgcaccgtccgagggcgctgggacacaggtacgtgtctcacctcaatggtcagcactagcatca

SEQ ID NO: 628 - DNA, 121 bp, synthetic construct
  misc_feature 1..121: note = Description of artificial sequence: synthetic polynucleotide sequence
  source 1..121: mol_type = other DNA
tgccccttctaggatgcggccaagcccctggaggtgctgttgctggagaagaaccgctcgctgcagtccgagaacgccgcgctgcgcatctccaacagcgacctgagcggtaggttggccg

SEQ ID NO: 629 - DNA, 331 bp, synthetic construct
  misc_feature 1..331: note = Description of artificial sequence: synthetic polynucleotide sequence
  source 1..331: mol_type = other DNA
gggtcagccaggaggaaagggaaagaccagcctgaaagtcggcgcccgggatctttgccggccccccctccttctcagttgccccgcaacccgggggagcaggcttccaatactaatggtacacaccagttctcaccagcggggttaagtcaagactttttcagctcatccctggcaagccccagcctacccctggcttctacaggaaaatttgcactaaactctcttctccagcggcagctaatgcagtccttctactccaaggctatgcaggaagccggaagcacaagcatgattttttcaacaggtccatacagcacaaactccatat

SEQ ID NO: 630 - DNA, 342 bp, synthetic construct
  misc_feature 1..342: note = Description of artificial sequence: synthetic polynucleotide sequence
  source 1..342: mol_type = other DNA
cttcccaaagtccattacaacaaagcccagatgtcaatggcatggccccatcccccagccagtcagaaagtgctgggagcgtctccgagggcgaggagatggacactgcagaaatcgcccggcaggtcaaagagcagctgattaagcacaatatcggacaacgtattttcggacattatgtgttgggactgtctcaagggtccgtgagcgagattctggcccggcccaagccatggaataaactgactgttcgtggcaaggagccatttcacaagatgaaacagttcctctccgatgagcagaacatcctggccctccgtagcatccaaggcagacaaagag

SEQ ID NO: 631 - DNA, 121 bp, synthetic construct
  misc_feature 1..121: note = Description of artificial sequence: synthetic polynucleotide sequence
  source 1..121: mol_type = other DNA
tgttcttaccacacttgtttttcaacagagaatccaggccagagcctgaacagactatttcaggaagtaccgaaacgaagaaatgggtctgaaggtatgttgcaggcaggcgttttctttg

SEQ ID NO: 632 - DNA, 121 bp, synthetic construct
  misc_feature 1..121: note = Description of artificial sequence: synthetic polynucleotide sequence
  source 1..121: mol_type = other DNA
ctccccacaggtaacatcaccacccggatccgagcctcggagactggctctgatgaagccatcaagtccatcctagagcaagccaagagggagctccaagtgcagaaaactggtacagctt

SEQ ID NO: 633 - DNA, 121 bp, synthetic construct
  misc_feature 1..121: note = Description of artificial sequence: synthetic polynucleotide sequence
  source 1..121: mol_type = other DNA
gcagagccggcccagccttcctccgcatccggcagcgggaactctgatgacgccatccgctccatcctgcagcaagcccgccgggagatggaggcccagcaggctgccctcgaccctgcct

SEQ ID NO: 634 - DNA, 121 bp, synthetic construct
  misc_feature 1..121: note = Description of artificial sequence: synthetic polynucleotide sequence
  source 1..121: mol_type = other DNA
taaagcaggcaccactgtcccagagtgacatcaccatcctcacccccaagcttctgtccacctcgcccatgcccaccgtgtccagctacccacctctcgccatctccctgaagaagccctc

SEQ ID NO: 635 - DNA, 241 bp, synthetic construct
  misc_feature 1..241: note = Description of artificial sequence: synthetic polynucleotide sequence
  source 1..241: mol_type = other DNA
gcagctcctgaggccggtgcctctgctctgccgaaccccccggccctcaaaaaggaggcccaggacgcccccgggctggacccccagggagcagccgattgtgcacaaggggtcctgagacaggtgaaaaatgaggtgggccgcagcggtgcctggaaggaccactggtggagcgcggtgcagccggagagaagaaatgccgcctcctccgaggaggccaaggccgaagaaacgggcggcg

SEQ ID NO: 636 - DNA, 241 bp, synthetic construct
  misc_feature 1..241: note = Description of artificial sequence: synthetic polynucleotide sequence
  source 1..241: mol_type = other DNA
ggaaagagaagggcagcggtggcagcggaggtggcagccagcctcgggccgagcgcagtcagctccagggaccctcgtcgtcagagtactggaaggagtggcccagcgctgagtccccatactcccagagctcagagctgagtctgaccggggccagccgcagcgagacaccacagaacagccccctgccatcctccccgatcgtgcccatgtccaagcccaccaagccctcggtcccccc

SEQ ID NO: 637 - DNA, 121 bp, synthetic construct
  misc_feature 1..121: note = Description of artificial sequence: synthetic polynucleotide sequence
  source 1..121: mol_type = other DNA
gctgacccccgagcagtacgaggtctacatgtaccaggaggtggacaccatcgagctcacccggcaggttaaggaaaagctggccaagaacggcatctgccagagaatcttcggggagaag

SEQ ID NO: 638 - DNA, 167 bp, synthetic construct
  misc_feature 1..167: note = Description of artificial sequence: synthetic polynucleotide sequence
  source 1..167: mol_type = other DNA
ggtgctgggcctgtcccagggcagcgtcagcgacatgctgtcccgaccgaagccatggagcaagctgacgcagaaaggccgagaacccttcatccggatgcagctctggctgaacggcgagctaggccagggtgttctacccgtccagggccagcagcaagggccag

SEQ ID NO: 639 - DNA, 121 bp, synthetic construct
  misc_feature 1..121: note = Description of artificial sequence: synthetic polynucleotide sequence
  source 1..121: mol_type = other DNA
cttcctttaattataacctttttctactttagtcctccactccgtgacatcgctccaggacccgctgcagcagggctgtgtgagctcaggtaagcagccagtttctgttgcttttgcatga

SEQ ID NO: 640 - DNA, 304 bp, synthetic construct
  misc_feature 1..304: note = Description of artificial sequence: synthetic polynucleotide sequence
  source 1..304: mol_type = other DNA
gaaagcactccaaagacctccgccagctgcagccctgcccctgagtccccgatgagttccagtgagtcggtgaagagcctgaccgagctggtccagcagccctgtccccccatcgaggcgagcaaggacagcaagccaccagagcccagtgacccgccagcatccgactcccagcccacaaccccgctgcctctctccggacactcggccctcagcatccaagaattagtagccatgtccccggagctggacacctacggcataaccaagcgggtgaaggaggtgctgacggacaacaacctcg

SEQ ID NO: 641 - DNA, 190 bp, synthetic construct
  misc_feature 1..190: note = Description of artificial sequence: synthetic polynucleotide sequence
  source 1..190: mol_type = other DNA
ggccagcgcttatttggggagaccatcttagggctcacccaaggctctgtctctgacctccttgcccgccccaaaccctggcataagctcagtctgaaaggacgagagcccttcgtccggatgcagctgtggctgaacgaccccaacaatgtggagaagctgatggacatgaaacggatggagaagaaag

SEQ ID NO: 642 - DNA, 266 bp, synthetic construct
  misc_feature 1..266: note = Description of artificial sequence: synthetic polynucleotide sequence
  source 1..266: mol_type = other DNA
gcctacatgaagcggcggcacagctcagtcagtgacagccagccctgcgaaccgccctctgtcggcaccgagtacagccagggcgccagcccccagccccagcaccagctgaagaaaccccgggtggtgctggctccggaggagaaggaggcgctgaaacgagcgtatcagcaaaagccatacccgtcaccaaaaaccatcgaagacctcgccacccagctcaacctgaaaaccagcaccgtcatcaactggttccacaactacag

SEQ ID NO: 643 - DNA, 306 bp, synthetic construct
  misc_feature 1..306: note = Description of artificial sequence: synthetic polynucleotide sequence
  source 1..306: mol_type = other DNA
ggtctcggatccgcagagaactgttcattgaggaaattcaggccgggagtcagggccaggcgggcgccagcgactcaccctcggcccgcagcggccgggcggcgcccagctcggagggcgacagctgcgacggcgtggaggccactgagggcccaggcagcgccgacaccgaggagcccaagtctcagggagaggccgagcgggaggaggtgccgcggccggcggagcagacggagccgccgccctcggggaccccgggcccggacgacgcccgcgacgacgaccacgagggaggccccgtggaag

SEQ ID NO: 644 - DNA, 326 bp, synthetic construct
  misc_feature 1..326: note = Description of artificial sequence: synthetic polynucleotide sequence
  source 1..326: mol_type = other DNA
gcccggggcccctgcccagccccgcctccgcgaccgccaccgccgcgcccgcggcccccgaggacgccgctacctcagccgccgccgcgccgggggagggccccgcggccccgagctccgcgccgccgcccagcaacagcagcagcagcagcgccccccgcaggcccagctcgctgcagagccttttcggcctccccgaggccgcgggcgcccgggactcgcgcgacaaccccctgcgcaagaagaaggccgcgaacttgaacagcatcatccaccgcctggagaaggccgccagccgggaggaacctatcgaatgggagttctga

SEQ ID NO: 645 - DNA, 121 bp, synthetic construct
  misc_feature 1..121: note = Description of artificial sequence: synthetic polynucleotide sequence
  source 1..121: mol_type = other DNA
gctgtgcagagctgcaagtccgtatcactgaggctgtggccacagccactgagcagagagagctgatcgcccgcctggagcaggacctgagcatcattcagtccatccagcggcccgatgc

SEQ ID NO: 646 - DNA, 121 bp, synthetic construct
  misc_feature 1..121: note = Description of artificial sequence: synthetic polynucleotide sequence
  source 1..121: mol_type = other DNA
ctcctcatcgcttcctgtcacctgcagggtgccgctgagcaccgcctggagaagatcccagagcccatcaaagaggccactgccctattctacggtaaggagaggcctgacccatgggagg

SEQ ID NO: 647 - DNA, 121 bp, synthetic construct
  misc_feature 1..121: note = Description of artificial sequence: synthetic polynucleotide sequence
  source 1..121: mol_type = other DNA
ctaggacctgcagcaccagccagcggtgccctcccagagggccaggtggattcactgctttccatcatctccagccagagggagcgcttccgtgcccggaaccaggagcttgaggccgtga

SEQ ID NO: 648 - DNA, 121 bp, synthetic construct
  misc_feature 1..121: note = Description of artificial sequence: synthetic polynucleotide sequence
  source 1..121: mol_type = other DNA
aggagaaccgcctggcccagcacaccctccaggccctgcagagtgagctggacagcctgcgcgccgacaacatcaagctctttgagaagatcaagttcctgcagagctaccctggccgggt

SEQ ID NO: 649 - DNA, 121 bp, synthetic construct
  misc_feature 1..121: note = Description of artificial sequence: synthetic polynucleotide sequence
  source 1..121: mol_type = other DNA
tcccctcctgtctgtgcagggcagcggcagtgatgacacggagctgcggtactcgtcccagtacgaggagcgcctggaccccttctcctccttcagcaagcgggttcgtgagcccagcctg

SEQ ID NO: 650 - DNA, 121 bp, synthetic construct
  misc_feature 1..121: note = Description of artificial sequence: synthetic polynucleotide sequence
  source 1..121: mol_type = other DNA
gggtcctttcctgactgtccctccctgtgcaggagcggcagaggaagtacctgagcttgagtccctgggacaaggccaccctcagcatggtgagtccctgcccctacccaccccctccctg

SEQ ID NO: 651 - DNA, 121 bp, synthetic construct
  misc_feature 1..121: note = Description of artificial sequence: synthetic polynucleotide sequence
  source 1..121: mol_type = other DNA
caccccctccttgctcccaggggcgtctggttctctccaacaagatggcgcgcaccatcggcttcttctacacactgttcctgcactgcctggtcttcctggtgagtgtgcacacgggcgg

SEQ ID NO: 652 - DNA, 121 bp, synthetic construct
  misc_feature 1..121: note = Description of artificial sequence: synthetic polynucleotide sequence
  source 1..121: mol_type = other DNA
gcagctcaccgtgtctccacctggccaggtgctctacaagctggcatggagcgagagcatggagagggactgtgccaccttctgcgccaagaagtgaggacccccacttgggccccccctc

SEQ ID NO: 653 - DNA, 121 bp, synthetic construct
  misc_feature 1..121: note = Description of artificial sequence: synthetic polynucleotide sequence
  source 1..121: mol_type = other DNA
tcagcaaagcttcccgtgtcccccaggttcgctgaccacctgcacaagttccacgagaatgacaacggggctgcggctggtgacttgtggcagtgataccccggggcctcccccgtgacag

SEQ ID NO: 654 - DNA, 121 bp, synthetic construct
  misc_feature 1..121: note = Description of artificial sequence: synthetic polynucleotide sequence
  source 1..121: mol_type = other DNA
ttcagaggaggggggaggaggtagcagatgtcaagggatttccatttctctttcgatgccgacatacttcagggcatcagcctggctgtatctgaaacaacaggaaggagatgtccgctgg

SEQ ID NO: 655 - DNA, 121 bp, synthetic construct
  misc_feature 1..121: note = Description of artificial sequence: synthetic polynucleotide sequence
  source 1..121: mol_type = other DNA
gaaatgtactttaccaacctgtaatcaaaaaacagctcttcgccagtctggatggctctcttggcaaaaatacctatcctgtgatcaccgttaaccatcataactgcaaagagacacactg

SEQ ID NO: 656 - DNA, 121 bp, synthetic construct
  misc_feature 1..121: note = Description of artificial sequence: synthetic polynucleotide sequence
  source 1..121: mol_type = other DNA
ctcacgtcaaaggtacctaccttttgcatagcagtttggatttaccgaatgatttgcaaaacgaattttgttacccttgcgggttgcatccaccacaaaatctaaaaagaaaaaagtaagc

SEQ ID NO: 657 - DNA, 121 bp, synthetic construct
  misc_feature 1..121: note = Description of artificial sequence: synthetic polynucleotide sequence
  source 1..121: mol_type = other DNA
ctcccagctctgaaacataccattgttcaagttgaacagaaagctgcacatgtatttatcatacactttccctcttctgtcagcttcatcttgagaaataatctaaaaagaaagacacagg

SEQ ID NO: 658 - DNA, 121 bp, synthetic construct
  misc_feature 1..121: note = Description of artificial sequence: synthetic polynucleotide sequence
  source 1..121: mol_type = other DNA
atcagtgccttacctctccacagtattctgagatgaattcatttttctgcacaggatctttgataaaaatcccccagcctgccacgtcagatggtgccagcaatagatgctagagaataaa

SEQ ID NO: 659 - DNA, 180 bp, synthetic construct
  misc_feature 1..180: note = Description of artificial sequence: synthetic polynucleotide sequence
  source 1..180: mol_type = other DNA
cctttttggagccccgctgaatactgcagttcttgcaggacacatttttactgtcccaatggtcagcggctccacaagtaagacagaggtcagggtcacactctcggacagccaggtagcacgggcactgcttggtgttgcactgtgctttgcagcggcatcccggaaagcggttttgac

SEQ ID NO: 660 - DNA, 121 bp, synthetic construct
  misc_feature 1..121: note = Description of artificial sequence: synthetic polynucleotide sequence
  source 1..121: mol_type = other DNA
tctgaactacattgacaaaacttttcacaaaaattttgtgctatcacacaagggcacgaactgtcacaaggctgccgtggatgatcacagggttgatagttgtaaacatggttagaggagc

SEQ ID NO: 661 - DNA, 121 bp, synthetic construct
  misc_feature 1..121: note = Description of artificial sequence: synthetic polynucleotide sequence
  source 1..121: mol_type = other DNA
attgttaagctaataatgagaggaatggaaagatgctaaccctttttcagctgtatctttctgcagtgtgcagcccacaacctgcaaaaacacaaagaaaattaaaccaaatttctgcggg

SEQ ID NO: 662 - DNA, 121 bp, synthetic construct
  misc_feature 1..121: note = Description of artificial sequence: synthetic polynucleotide sequence
  source 1..121: mol_type = other DNA
atgacagactcaccggtgtttcctcttctttttccttggaggagtatccacatcctcagcgggagctggagctatgatgctagattctttgactctaaactcatacacctgacaagaggca

SEQ ID NO: 663 - DNA, 171 bp, synthetic construct
  misc_feature 1..171: note = Description of artificial sequence: synthetic polynucleotide sequence
  source 1..171: mol_type = other DNA
cctgtctacatgttttggtcccaattaacctagcaatggcacagaaattgtcatagtaagtgccaatgaggactctaaacattgaggcttcagcaccactccactccacattctcaggaggttcaatatttggcttcatctttattggtgtttgacaccgagaatttgctt

SEQ ID NO: 664 - DNA, 121 bp, synthetic construct
  misc_feature 1..121: note = Description of artificial sequence: synthetic polynucleotide sequence
  source 1..121: mol_type = other DNA
ccagaggagctcgaagtttcatctttcttctcttcttcttctttatcattgttctctccccccgtttcagtccctgcttccctatcactgtctgtatcctttgattccagcacattaatgg

SEQ ID NO: 665 - DNA, 121 bp, synthetic construct
  misc_feature 1..121: note = Description of artificial sequence: synthetic polynucleotide sequence
  source 1..121: mol_type = other DNA
tgggggtgctgggcctgctactgttattgggaagccgtcctcttctgcggcctcctggacgttttggtggggtctttatccgctcagcggtgagagcagcagcaaactcctttgctccctc

SEQ ID NO: 666 - DNA, 121 bp, synthetic construct
  misc_feature 1..121: note = Description of artificial sequence: synthetic polynucleotide sequence
  source 1..121: mol_type = other DNA
ggcactaagtcttaccaaatgctggtaacactgtggtccacaaggtttgttgtctagagctgtttctgtgttcttccgcttataagtgttgggtgttgcatgaaaagctgcaaaataaatg

SEQ ID NO: 667 - DNA, 180 bp, synthetic construct
  misc_feature 1..180: note = Description of artificial sequence: synthetic polynucleotide sequence
  source 1..180: mol_type = other DNA
caataattgcacttacgatgtaggaagcagtcatatttaaaacatcgcctacagaaaagcgtatgaaaggagtgtaagctttgctctctctgaacagatttagcatttggtccatctatgttgggggtacattcaggaggaagtgcgcctgggagctgctgttcggtgagttctttatat

SEQ ID NO: 668 - DNA, 121 bp, synthetic construct
  misc_feature 1..121: note = Description of artificial sequence: synthetic polynucleotide sequence
  source 1..121: mol_type = other DNA
aattcttacttttcctttagttcttctgctgtgcccttatctggaaacattgaggaaatggcttcaaaaattttatcagaaggaaatttccgaggtgggcggctttctttatctaaacagg

SEQ ID NO: 669 - DNA, 142 bp, synthetic construct
  misc_feature 1..142: note = Description of artificial sequence: synthetic polynucleotide sequence
  source 1..142: mol_type = other DNA
ccatctcggtgatcctccagatctttctgcttttcttctctttcttcaggatcgtctccatcatcatcatcgtcatcatcattatattgaccaagggcattcaccaactccacaaaaatttcatcatttataaacccacatt

SEQ ID NO: 670 - DNA, 121 bp, synthetic construct
  misc_feature 1..121: note = Description of artificial sequence: synthetic polynucleotide sequence
  source 1..121: mol_type = other DNA
ctctatccccgtgtactttcccatcataattttttattagttcttcaatgaaagtaccatcctgatctaaaacttcatctcccatataaggaatgttatgtaaaacagtttcatcttccac

SEQ ID NO: 671 - DNA, 121 bp, synthetic construct
  misc_feature 1..121: note = Description of artificial sequence: synthetic polynucleotide sequence
  source 1..121: mol_type = other DNA
accataaaattctgctgtaggggagaccaagaatacattatgggtactgaagcaactgcattcagagtctttaatgggatgacttgtgttggaaaatccaagtcactggtcaccgaacact

SEQ ID NO: 672 - DNA, 121 bp, synthetic construct
  misc_feature 1..121: note = Description of artificial sequence: synthetic polynucleotide sequence
  source 1..121: mol_type = other DNA
ctagtcccgcgcaatgagctcacagaagtcaggatgtgcacaggctgtatccttcgctgtttccattcttggtttaagatttccgttctttccaaaattttctgacgattggaactaaaca

SEQ ID NO: 673 - DNA, 121 bp, synthetic construct
  misc_feature 1..121: note = Description of artificial sequence: synthetic polynucleotide sequence
  source 1..121: mol_type = other DNA
acctttacttcatcagctcgtctgaacctcttgagctgtctcagtcgcatgtactctgattttacacgcttccgccaacaaactggtcccttctcagatttcttcccagtctggcccatga

SEQ ID NO: 674 - DNA, 121 bp, synthetic construct
  misc_feature 1..121: note = Description of artificial sequence: synthetic polynucleotide sequence
  source 1..121: mol_type = other DNA
ctgtctctttctctgtactgaggccagaccactgcttcataaataagcaaagaaatgaattgtagtaatgaataatcagcacaagatttttgcaaagactaaagttttattccaatcagtg

SEQ ID NO: 675 - DNA, 121 bp, synthetic construct
  misc_feature 1..121: note = Description of artificial sequence: synthetic polynucleotide sequence
  source 1..121: mol_type = other DNA
tcctttggaagacacatctctgagctctctgtgaggaggacagcctcattgatgccctcagtgatgtaatttatgttgttggcattgatacagctgaagttaatctgaccgttcttgggga

SEQ ID NO: 676 - DNA, 121 bp, synthetic construct
  misc_feature 1..121: note = Description of artificial sequence: synthetic polynucleotide sequence
  source 1..121: mol_type = other DNA
cccgcattttaatgttttcaggggggtgtcatagccccgggtttggccgccccagccccgccttccccgccccggggagcccgccccctgccccgcgtccctgccgacaggtgagtccccc

SEQ ID NO: 677 - DNA, 121 bp, synthetic construct
  misc_feature 1..121: note = Description of artificial sequence: synthetic polynucleotide sequence
  source 1..121: mol_type = other DNA
acatcagtatgagctggtcaccttccctgacaacgcagacatgtggggcctgggaaatgaaagagcgccttgggacagggggatttggaaatgtcatccgatggcacaatcaggtaggccc

SEQ ID NO: 678 - DNA, 121 bp, synthetic construct
  misc_feature 1..121: note = Description of artificial sequence: synthetic polynucleotide sequence
  source 1..121: mol_type = other DNA
gctgtttctgtaggaaacaggtgagcagattgccatcaagcagtgccggcaggagctcagcccccggaaccgagagcggtggtgcctggagatccagatcatgagaaggtgagggcctcgc

SEQ ID NO: 679 - DNA, 121 bp, synthetic construct
  misc_feature 1..121: note = Description of artificial sequence: synthetic polynucleotide sequence
  source 1..121: mol_type = other DNA
aggctgacccaccccaatgtggtggctgcccgagatgtccctgaggggatgcagaacttggcgcccaatgacctgcccctgctggccatggagtactgccaaggaggagatctccggaagg

SEQ ID NO: 680 - DNA, 121 bp, synthetic construct
  misc_feature 1..121: note = Description of artificial sequence: synthetic polynucleotide sequence
  source 1..121: mol_type = other DNA
gatgctgcttttcactttcttgacagtacctgaaccagtttgagaactgctgtggtctgcgggaaggtgccatcctcaccttgctgagtgacattggtaaatcccagtcccggaattcagg

SEQ ID NO: 681 - DNA, 121 bp, synthetic construct
  misc_feature 1..121: note = Description of artificial sequence: synthetic polynucleotide sequence
  source 1..121: mol_type = other DNA
cccccctcttcctcagcctctgcgcttagataccttcatgaaaacagaatcatccatcgggatctaaagccagaaaacatcgtcctgcagcaaggagaacagagggtaagtgacctcctgg

SEQ ID NO: 682 - DNA, 121 bp, synthetic construct
  misc_feature 1..121: note = Description of artificial sequence: synthetic polynucleotide sequence
  source 1..121: mol_type = other DNA
cttccttttgttttagttaatacacaaaattattgacctaggatatgccaaggagctggatcagggcagtctttgcacatcattcgtggggaccctgcagtacctggtaagaagtgggcct

SEQ ID NO: 683 - DNA, 121 bp, synthetic construct
  misc_feature 1..121: note = Description of artificial sequence: synthetic polynucleotide sequence
  source 1..121: mol_type = other DNA
cccagagctactggagcagcagaagtacacagtgaccgtcgactactggagcttcggcaccctggcctttgagtgcatcacgggcttccggcccttcctccccaactggcagcccgtgcag

SEQ ID NO: 684 - DNA, 121 bp, synthetic construct
  misc_feature 1..121: note = Description of artificial sequence: synthetic polynucleotide sequence
  source 1..121: mol_type = other DNA
tttgcaggcattcaaaagtgcggcagaagagtgaggtggacattgttgttagcgaagacttgaatggaacggtgaagttttcaagctctttaccctaccccaataatcttaacaggtaagg

SEQ ID NO: 685 - DNA, 121 bp, synthetic construct
  misc_feature 1..121: note = Description of artificial sequence: synthetic polynucleotide sequence
  source 1..121: mol_type = other DNA
ctggctgagcgactggagaagtggctgcaactgatgctgatgtggcacccccgacagaggggcacggatcccacgtatgggcccaatggctgcttcaaggccctggatgacatcttaaact

SEQ ID NO: 686 - DNA, 196 bp, synthetic construct
  misc_feature 1..196: note = Description of artificial sequence: synthetic polynucleotide sequence
  source 1..196: mol_type = other DNA
gctggttcatatcttgaacatggtcacgggcaccatccacacctaccctgtgacagaggatgagagtctgcagagcttgaaggccagaatccaacaggacacgggcatcccagaggaggaccaggagctgctgcaggaagcgggcctggcgttgatccccgataagcctgccactcagtgtatttcagacggcaag

SEQ ID NO: 687 - DNA, 121 bp, synthetic construct
  misc_feature 1..121: note = Description of artificial sequence: synthetic polynucleotide sequence
  source 1..121: mol_type = other DNA
cagttaaatgagggccacacattggacatggatcttgtttttctctttgacaacagtaaaatcacctatgagactcagatctccccacggccccaacctgaaagtgtcagctgtatccgta

SEQ ID NO: 688 - DNA, 121 bp, synthetic construct
  misc_feature 1..121: note = Description of artificial sequence: synthetic polynucleotide sequence
  source 1..121: mol_type = other DNA
tcaagagcccaagaggaatctcgccttcttccagctgaggaaggtgtggggccaggtctggcacagcatccagaccctgaaggaagattgcaaccggctgcagcagggacagcgagccgcc

SEQ ID NO: 689 - DNA, 153 bp, synthetic construct
  misc_feature 1..153: note = Description of artificial sequence: synthetic polynucleotide sequence
  source 1..153: mol_type = other DNA
ggatgaatctcctccgaaacaacagctgcctctccaaaatgaagaattccatggcttccatgtctcagcagctcaaggccaagttggatttcttcaaaaccagcatccagattgacctggagaagtacagcgagcaaaccgagtttgggatca

SEQ ID NO: 690 - DNA, 121 bp, synthetic construct
  misc_feature 1..121: note = Description of artificial sequence: synthetic polynucleotide sequence
  source 1..121: mol_type = other DNA
ttttgtttttccttctcaattttttttcagcatcagataaactgctgctggcctggagggaaatggagcaggctgtggagctctgtgggcgggtaggagactcattttgggtttcggaact

SEQ ID NO: 691 - DNA, 121 bp, synthetic construct
  misc_feature 1..121: note = Description of artificial sequence: synthetic polynucleotide sequence
  source 1..121: mol_type = other DNA
cattaggagaacgaagtgaaactcctggtagaacggatgatggctctgcagaccgacattgtggacttacagaggagccccatgggccggaagcaggggggaacgctggacgacctgtgag

SEQ ID NO: 692 - DNA, 121 bp, synthetic construct
  misc_feature 1..121: note = Description of artificial sequence: synthetic polynucleotide sequence
  source 1..121: mol_type = other DNA
cctcaagtctagacagaacttctttgtatattttagagaggagcaagcaagggagctgtacaggagactaagggaaaaacctcgaggtaagtggggttctgtgtctgccttgggcttctcc

SEQ ID NO: 693 - DNA, 121 bp, synthetic construct
  misc_feature 1..121: note = Description of artificial sequence: synthetic polynucleotide sequence
  source 1..121: mol_type = other DNA
cctctctccagaccagcgaactgagggtgacagtcaggaaatggtacggctgctgcttcaggcaattcagagcttcgagaagaaagtgcgagtgatctatacgcagctcaggtatgagccc

SEQ ID NO: 694 - DNA, 149 bp, synthetic construct
  misc_feature 1..149: note = Description of artificial sequence: synthetic polynucleotide sequence
  source 1..149: mol_type = other DNA
gtaaaactgtggtttgcaagcagaaggcgctggaactgttgcccaaggtggaagaggtggtgagcttaatgaatgaggatgagaagactgttgtccggctgcaggagaagcggcagaaggagctctggaatctcctgaagattgcttgt

SEQ ID NO: 695 - DNA, 121 bp, synthetic construct
  misc_feature 1..121: note = Description of artificial sequence: synthetic polynucleotide sequence
  source 1..121: mol_type = other DNA
aaggtccgtggtcctgtcagtggaagcccggatagcatgaatgcctctcgacttagccagcctgggcagctgatgtctcagccctccacggcctccaacagcttacctgagccagccaaga

SEQ ID NO: 696 - DNA, 121 bp, synthetic construct
  misc_feature 1..121: note = Description of artificial sequence: synthetic polynucleotide sequence
  source 1..121: mol_type = other DNA
gatcattttctttagtgaagaactggtggctgaagcacataacctctgcaccctgctagaaaatgccatacaggacactgtgagggaacaagaccagagtttcacggtaacagcttgtgtg

SEQ ID NO: 697 - DNA, 121 bp, synthetic construct
  misc_feature 1..121: note = Description of artificial sequence: synthetic polynucleotide sequence
  source 1..121: mol_type = other DNA
tttttttaacatgtctgttgactttcaggccctagactggagctggttacagacggaagaagaagagcacagctgcctggagcaggcctcatgatgtggggggactcgaccccctgacatg

SEQ ID NO: 698 - DNA, 121 bp, synthetic construct
  misc_feature 1..121: note = Description of artificial sequence: synthetic polynucleotide sequence
  source 1..121: mol_type = other DNA
aaggagacagtctccttttgtttttattcttcccccacacactcagggccgcccatcaggagatgcctttatccagatgaagtctgcggacagagcatttatggctgcacagaagtgtcat

SEQ ID NO: 699 - DNA, 121 bp, synthetic construct
  misc_feature 1..121: note = Description of artificial sequence: synthetic polynucleotide sequence
  source 1..121: mol_type = other DNA
acatgaaggacagatatgttgaagtctttcagtgttcagctgaggagatgaactttgtgttaatggggggcactttaaatcgaaatggcttatccccaccgccatgtaagttaccatgtaa

SEQ ID NO: 700 - DNA, 121 bp, synthetic construct
  misc_feature 1..121: note = Description of artificial sequence: synthetic polynucleotide sequence
  source 1..121: mol_type = other DNA
tttcagtaagtcctatttctgctagtaagctactttttaattgtgcagcaagatcatgagcagatggccctggttttgaactctcagtttcttctggcagcacgggctgttcttccccttc

SEQ ID NO: 701 - DNA, 121 bp, synthetic construct
  misc_feature 1..121: note = Description of artificial sequence: synthetic polynucleotide sequence
  source 1..121: mol_type = other DNA
tgccggttttgcatgttcattacatttttcagattggcagcataagacatttttgttggaagaacctatgaatatttacatttaaaagttacaaatgaagggaaaaaaactaattagattt

SEQ ID NO: 702 - DNA, 121 bp, synthetic construct
  misc_feature 1..121: note = Description of artificial sequence: synthetic polynucleotide sequence
  source 1..121: mol_type = other DNA
tggggcccgagctccgggtggtgaaggtgcgcatgggcatggtaagggggtggggggcctgggggcggcggcagaggagggagcggaggcgcggggggtaggtctacggtgctgcccggga

SEQ ID NO: 703 - DNA, 121 bp, synthetic construct
  misc_feature 1..121: note = Description of artificial sequence: synthetic polynucleotide sequence
  source 1..121: mol_type = other DNA
cagaaatgaggtggagatcaagttctcttgtacttagcctgtgacccaagctgccatcatcaatccttagcacagcctttccttacccatgcactggcttctcagtgaaatcttccagaga

SEQ ID NO: 704 - DNA, 121 bp, synthetic construct
  misc_feature 1..121: note = Description of artificial sequence: synthetic polynucleotide sequence
  source 1..121: mol_type = other DNA
acaggcatgagccaccacaactggccaccacactactttggatataaaatggggttgagacttccattttcacagaactgatgtcaaaatcagatcgaacaagaaaatgtggtgaatgaac

SEQ ID NO: 705 - DNA, 121 bp, synthetic construct
  misc_feature 1..121: note = Description of artificial sequence: synthetic polynucleotide sequence
  source 1..121: mol_type = other DNA
tggtgtcacccagaaagtgggtgaaattgcgaggacaggcagcacccctgaagtcagtacggtggatgccatgttagatctcatcaggtgagtgttttgccacaaggtggcttcaagggca

SEQ ID NO: 706 - DNA, 121 bp, synthetic construct
  misc_feature 1..121: note = Description of artificial sequence: synthetic polynucleotide sequence
  source 1..121: mol_type = other DNA
ggacaagaggatcactcgattcgtgttacccgttggtgcaacaatcaacatggatgggactgcgctctatgaagcagtggcagcggtgtttattgcacagttgaatgacctggacttgggc

SEQ ID NO: 707 - DNA, 121 bp, synthetic construct
  misc_feature 1..121: note = Description of artificial sequence: synthetic polynucleotide sequence
  source 1..121: mol_type = other DNA
atggaatcttgctgaagctcaacagaaacttggtagcttagcactgcataattctgagtccttggatcaggagcatgccaaagcacaaacagcagtatcagaactgaggcaacgggaagaa

SEQ ID NO: 708 - DNA, 121 bp, synthetic construct
  misc_feature 1..121: note = Description of artificial sequence: synthetic polynucleotide sequence
  source 1..121: mol_type = other DNA
cttactctgttgcccaggtgggagtgcagtggtgcaatcatagctcgagtagctaggactacaggctcctgccatcatgcctggctaattttaaaacaatttttttgtagagatgggggtc

SEQ ID NO: 709 - DNA, 227 bp, synthetic construct
  misc_feature 1..227: note = Description of artificial sequence: synthetic polynucleotide sequence
  source 1..227: mol_type = other DNA
catgggaatggcctgccttacgatgacagaaatggagggaacatccacctcttctatatatcagaatggtgatatttctggaaatgccaattctatgaagcaaatagatccagttcttcaggtgtatctttaccattcccttgggaaatctgaggcagattatctgacctttccatctggggagtatgttgcagaagaaatctgtattgctgcttctaaagcttgtg

SEQ ID NO: 710 - DNA, 121 bp, synthetic construct
  misc_feature 1..121: note = Description of artificial sequence: synthetic polynucleotide sequence
  source 1..121: mol_type = other DNA
tatcacacctgtgtatcataatatgtttgctttaatgagtgaaacagaaaggatctggtatccacccaaccatgtcttccatatagatgagtcaaccaggcataatgtactctacagaata

SEQ ID NO: 711 - DNA, 121 bp, synthetic construct
  misc_feature 1..121: note = Description of artificial sequence: synthetic polynucleotide sequence
  source 1..121: mol_type = other DNA
agattttactttcctcgttggtattgcagtggcagcaacagagcctatcggcatggaatatctcgaggtgctgaagctcctcttcttgatgactttgtcatgtcttacctctttgctcagg

SEQ ID NO: 712 - DNA, 147 bp, synthetic construct
  misc_feature 1..147: note = Description of artificial sequence: synthetic polynucleotide sequence
  source 1..147: mol_type = other DNA
gtggcggcatgattttgtgcacggatggataaaagtacctgtgactcatgaaacacaggaagaatgtcttgggatggcagtgttagatatgatgagaatagccaaagaaaacgatcaaaccccactggccatctataactctatcag

SEQ ID NO: 713 - DNA, 323 bp, synthetic construct
  misc_feature 1..323: note = Description of artificial sequence: synthetic polynucleotide sequence
  source 1..323: mol_type = other DNA
gctacaagacattcttaccaaaatgtattcgagcaaagatccaagactatcatattttgacaaggaagcgaataaggtacagatttcgcagatttattcagcaattcagccaatgcaaagccactgccagaaacttgaaacttaagtatcttataaatctggaaactctgcagtctgccttctacacagagaaatttgaagtaaaagaacctggaagtggtccttcaggtgaggagatttttgcaaccattataataactggaaacggtggaattcagtggtcaagagggaaacataaagaaagtgagacactgacagaacag

SEQ ID NO: 714 - DNA, 121 bp, synthetic construct
  misc_feature 1..121: note = Description of artificial sequence: synthetic polynucleotide sequence
  source 1..121: mol_type = other DNA
ggatttacagttatattgcgattttcctaatattattgatgtcagtattaagcaagcaaaccaagagggttcaaatgaaagccgagttgtaactatccataagcaagatggtaaaaatctg

SEQ ID NO: 715 - DNA, 159 bp, synthetic construct
  misc_feature 1..159: note = Description of artificial sequence: synthetic polynucleotide sequence
  source 1..159: mol_type = other DNA
ggaaattgaacttagctcattaagggaagctttgtctttcgtgtcattaattgatggatattatagattaactgcagatgcacatcattacctctgtaaagaagtagcacctccagccgtgcttgaaaatatacaaagcaactgtcatggcccaatttc

SEQ ID NO: 716 - DNA, 121 bp, synthetic construct
  misc_feature 1..121: note = Description of artificial sequence: synthetic polynucleotide sequence
  source 1..121: mol_type = other DNA
tttaggatggattttgccattagtaaactgaagaaagcaggtaatcagactggactgtatgtacttcgatgcagtcctaaggactttaataaatattttttgacttttgctgtcgaggtta

SEQ ID NO: 717 - DNA, 188 bp, synthetic construct
  misc_feature 1..188: note = Description of artificial sequence: synthetic polynucleotide sequence
  source 1..188: mol_type = other DNA
gcgagaaaatgtcattgaatataaacactgtttgattacaaaaaatgagaatgaagagtacaacctcagtgggacaaagaagaacttcagcagtcttaaagatcttttgaattgttaccagatggaaactgttcgctcagacaatataattttccagtttactaaatgctgtcccccaaagccaaaag

SEQ ID NO: 718 - DNA, 121 bp, synthetic construct
  misc_feature 1..121: note = Description of artificial sequence: synthetic polynucleotide sequence
  source 1..121: mol_type = other DNA
aatcaaaccttctagtcttcagaacgaatggtgtttctgatgtaccaacctcaccaacattacagaggcctactcatatgaaccaaatggtgtttcacaaaatcagaaatgaagatttgat

SEQ ID NO: 719 - DNA, 136 bp, synthetic construct
  misc_feature 1..136: note = Description of artificial sequence: synthetic polynucleotide sequence
  source 1..136: mol_type = other DNA
gaatgaaagccttggccaaggcacttttacaaagatttttaaaggcgtacgaagagaagtaggagactacggtcaactgcatgaaacagaagttcttttaaaagttctggataaagcacacagaaactattcagag

SEQ ID NO: 720 - DNA, 121 bp, synthetic construct
  misc_feature 1..121: note = Description of artificial sequence: synthetic polynucleotide sequence
  source 1..121: mol_type = other DNA
cttttttttttccttagtctttctttgaagcagcaagtatgatgagcaagctttctcacaagcatttggttttaaattatggagtatgtgtctgtggagacgagagtaagtaaaactacag

SEQ ID NO: 721 - DNA, 121 bp, synthetic construct
  misc_feature 1..121: note = Description of artificial sequence: synthetic polynucleotide sequence
  source 1..121: mol_type = other DNA
ttctggttcaggagtttgtaaaatttggatcactagatacatatctgaaaaagaataaaaattgtataaatatattatggaaacttgaagttgctaaacagttggcatgggccatgcattt

SEQ ID NO: 722 - DNA, 140 bp, synthetic construct
  misc_feature 1..140: note = Description of artificial sequence: synthetic polynucleotide sequence
  source 1..140: mol_type = other DNA
ggaagaaaacacccttattcatgggaatgtatgtgccaaaaatattctgcttatcagagaagaagacaggaagacaggaaatcctcctttcatcaaacttagtgatcctggcattagtattacagttttgccaaaggaca

SEQ ID NO: 723 - DNA, 153 bp, synthetic construct
  misc_feature 1..153: note = Description of artificial sequence: synthetic polynucleotide sequence
  source 1..153: mol_type = other DNA
gttcttcaggagagaataccatgggtaccacctgaatgcattgaaaatcctaaaaatttaaatttggcaacagacaaatggagttttggtaccactttgtgggaaatctgcagtggaggagataaacctctaagtgctctggattctcaaaga

SEQ ID NO: 724 - DNA, 152 bp, synthetic construct
  misc_feature 1..152: note = Description of artificial sequence: synthetic polynucleotide sequence
  source 1..152: mol_type = other DNA
gaagctacaattttatgaagataggcatcagcttcctgcaccaaagtgggcagaattagcaaaccttataaataattgtatggattatgaaccagatttcaggccttctttcagagccatcatacgagatcttaacagtttgtttactccag

SEQ ID NO: 725 - DNA, 138 bp, synthetic construct
  misc_feature 1..138: note = Description of artificial sequence: synthetic polynucleotide sequence
  source 1..138: mol_type = other DNA
gattatgaactattaacagaaaatgacatgttaccaaatatgaggataggtgccctggggttttctggtgcctttgaagaccgggatcctacacagtttgaagagagacatttgaaatttctacagcaacttggcaag

SEQ ID NO: 726 - DNA, 191 bp, synthetic construct
  misc_feature 1..191: note = Description of artificial sequence: synthetic polynucleotide sequence
  source 1..191: mol_type = other DNA
gggtaattttgggagtgtggagatgtgccggtatgaccctctacaggacaacactggggaggtggtcgctgtaaaaaagcttcagcatagtactgaagagcacctaagagactttgaaagggaaattgaaatcctgaaatccctacagcatgacaacattgtaaagtacaagggagtgtgctacagtgctg

SEQ ID NO: 727 - DNA, 121 bp, synthetic construct
  misc_feature 1..121: note = Description of artificial sequence: synthetic polynucleotide sequence
  source 1..121: mol_type = other DNA
cggcgtaatctaaaattaattatggaatatttaccatatggaagtttacgagactatcttcaaaaacataaagaacggatagatcacataaaacttctgcagtacacatctcagatatgca

SEQ ID NO: 728 - DNA, 174 bp, synthetic construct
  misc_feature 1..174: note = Description of artificial sequence: synthetic polynucleotide sequence
  source 1..174: mol_type = other DNA
gggtatggagtatcttggtacaaaaaggtatatccacagggatctggcaacgagaaatatattggtggagaacgagaacagagttaaaattggagattttgggttaaccaaagtcttgccacaagacaaagaatactataaagtaaaagaacctggtgaaagtcccatattctg

SEQ ID NO: 729 - DNA, 121 bp, synthetic construct
  misc_feature 1..121: note = Description of artificial sequence: synthetic polynucleotide sequence
  source 1..121: mol_type = other DNA
aggtatgctccagaatcactgacagagagcaagttttctgtggcctcagatgtttggagctttggagtggttctgtatgaacttttcacatacattgagaagagtaaaagtccaccagcgg

SEQ ID NO: 730 - DNA, 121 bp, synthetic construct
  misc_feature 1..121: note = Description of artificial sequence: synthetic polynucleotide sequence
  source 1..121: mol_type = other DNA
ttaggaatttatgcgtatgattggcaatgacaaacaaggacagatgatcgtgttccatttgatagaacttttgaagaataatggaagattaccaagaccagatggatgcccagatgaggta

SEQ ID NO: 731 - DNA, 121 bp, synthetic construct
  misc_feature 1..121: note = Description of artificial sequence: synthetic polynucleotide sequence
  source 1..121: mol_type = other DNA
tttacagatctatatgatcatgacagaatgctggaacaataatgtaaatcaacgcccctcctttagggatctagctcttcgagtggatcaaataagggataacatggctggatgaaagaaa

SEQ ID NO: 732 - DNA, 121 bp, synthetic construct
  misc_feature 1..121: note = Description of artificial sequence: synthetic polynucleotide sequence
  source 1..121: mol_type = other DNA
ccccatgcctgagaagacattcaccaccaccccaggagggtggctgctggaatctggacgtcccaaaggtgagagccctggactaccaaacaatcagaatgaggcctgaaaaaacaggctc

SEQ ID NO: 733 - DNA, 121 bp, synthetic construct
  misc_feature 1..121: note = Description of artificial sequence: synthetic polynucleotide sequence
  source 1..121: mol_type = other DNA
aataagtttcttaaattcttcaaagctaagattggaatcctttaatgcaggtacatactgctgtagctctggtaatgatggttgcctctcagatagggctgccttcagctccggtggcaaa

SEQ ID NO: 734 - DNA, 475 bp, synthetic construct
  misc_feature 1..475: note = Description of artificial sequence: synthetic polynucleotide sequence
  source 1..475: mol_type = other DNA
gtagggagcgttgttcctccgcgggtgcccacggcccagtatctctggctagctcgctgggcactttaggacggagggtctctacaccctttctttgggatggagagaggagaagggaaagggaacgcgatggtctagggggcagtagagccaattacctgttggggttaataagaacaggcaatgcatctggccttcctccaggcgcgattcagttttgctctaaaaataatttatacctctaaaaataaataagataggtagtataggataggtagtcattcttatgcgactgtgtgttcagaatatagctctgatgctaggctggaggtctggacacgggtccaagtccaccgccagctgcttgctagtaacatgacttgtgtaagttatcccagctgcagcatctaagtaagtctcttcctgcgctaagcaggtccaggatccctgaacggaatttatttgctctgtccat

SEQ ID NO: 735 - DNA, 475 bp, synthetic construct
  misc_feature 1..475: note = Description of artificial sequence: synthetic polynucleotide sequence
  source 1..475: mol_type = other DNA
tctgagaacccaaaggagtcctaaaagaggaatggaggagcctaagaataaaaatagtataataaaacatttcttagacacattgaccttggcctatgtcaaagttcagtctgggtttgtcttataacacaaggagtaaaagtaccattgttctacctctttttttaatacttgaaaaaaatttactgtggatgcttttctatgaattaaataaccttctaaaaaatgttttcattgctgcattcgattagattgggtaactaaatgaaattaattcctcactgttgggtataaaggttatttacagtggttctgtcttagccattcactgaactcattgcatatatatctctggaatattgctgattgtttccttcaagtaaacttagaagtgtaactacttagtcaaagagcctgaatattttaaaggccttttgaagaaaactgaaaatgctttccagaaaggatgtatcag

SEQ ID NO: 736 - DNA, 476 bp, synthetic construct
  misc_feature 1..476: note = Description of artificial sequence: synthetic polynucleotide sequence
  source 1..476: mol_type = other DNA
ttgacaatgacagtcgtcaacagtatttaaggagaactatgatactctgaagaaaaacttagcctttctcagtaaaagtaggtaggcagaggccacatgacagcagttagagtgtggtcttcaaggaagtcacagaaatactgtggggaattgaaaccccatgtggaaaatgtacaagagtgtctcagtgtgactgagaaggaggttgggcatggggtttcatggagtttaataaagtttggtcacttagtagaggtttaataaatcaactgtcttaatctttgatcctacttaagaattttttttttgtttttgtagagatggggctcttgttatgttgcccaggctgttctcgaactcctagcctcaggcgatcctccctcctcaggctccagaagtcctgggattactggcgggagccaccatgcaggcctcttgctcctacttttgagaaaggaagtttaaccggttttttt

SEQ ID NO: 737 - DNA, 237 bp, synthetic construct
  misc_feature 1..237: note = Description of artificial sequence: synthetic polynucleotide sequence
  source 1..237: mol_type = other DNA
cgcctgcctcggcctcccaaagtgctgggattacaggcatgagccactgctcctggctgcttaactttttctctatctcatcctcctacccatcctacccttggaagatagagaagtagtattagttccatagtgttatactgggcttcccccagggacaaacccacttccccaacctgaatgagccatcacttcttccccagtttacatttcattgctctttaaatgtctccattc

SEQ ID NO: 738 - DNA, 474 bp, synthetic construct
  misc_feature 1..474: note = Description of artificial sequence: synthetic polynucleotide sequence
  source 1..474: mol_type = other DNA
ggatatgggaattcacatatggtcataattcttacctgaagaagatgtcagtcttcttctcttagaccaactgccctgatatgaggtttagaggttaaagaacatgtgtgtatttacatgatctttgtattctgccttttcgtccctcactaatgacagctgcaccccaaggaaatggagctgtggaagagagggtttgataagaaattaagtaaatattggatctaatccatcaccctccaggaagcctttattactcctaaaaatttcaaccaaattcattaaaggacaagaactccaccagagtaggccataaacattggcaaaattagttgtaatccatgactagatttaatgtccctttgttttattcccatatggttataatgctttgcttggcattaggggtattttaagttttcttctgcctagtaagtgaatttgtgtttataatacaataatcataaaatatca

SEQ ID NO: 739 - DNA, 476 bp, synthetic construct
  misc_feature 1..476: note = Description of artificial sequence: synthetic polynucleotide sequence
  source 1..476: mol_type = other DNA
cattaatattttataactgtacagttataaaatattttataagtaatatttatattttataagtaatattttataactgtacagttaactctggcccaaggaaaagatagtctgatagatgctgcagccccattttagcaaatgtgacctcacaggcctgaatgccatcgctattccacatctacaggatagacggaaaggaaagaaataaaaaaataggtacctaacactggcaagaggatgatgactcatgttatttcacttaacctttttatcttttaacatgaaggactcatacaggttgataagaaaccagtgacataaacagaccaaaaaatgatcagatctttcaaattagcaaaaaaataatattttttaaacaatgggtgaaaatacagtgtaacagtaccaattatcaacatgtgttgagaaccagaaaaatgttctttttctttgatcagcaacactatttggga

SEQ ID NO: 740 - DNA, 474 bp, synthetic construct
  misc_feature 1..474: note = Description of artificial sequence: synthetic polynucleotide sequence
  source 1..474: mol_type = other DNA
aaatctatcctcagggcctagcctggggccctggcacacagtaggcactcaacgaatatttgctgaacacacaaatacttatgatattttaaaaaattggcaacaatctgatacctaacaatagagggattaaatattatggaactgttaaataagatgcttatgaataccatgcagtaagatgggcaatatttatgccataagctttaatgaaacaaatgggtattaaatgtatgataaggttataaattactttttaaaagattacagggaaaaaaattgaaagatatacactgaaatgttttttgctcacagtggtgacaaggtttctcagcactggcactgttgacgttttaggctgtatgtctttgctgtgggaggctggcctgtgcactgcagggtgtttggcagcactcttggcctctgcccctagatagcaatagcagtcctccctcaaccagcccaattttgaca

SEQ ID NO: 741 - DNA, 476 bp, synthetic construct
  misc_feature 1..476: note = Description of artificial sequence: synthetic polynucleotide sequence
  source 1..476: mol_type = other DNA
accaaaaatgtttccaggcatcaccagatgctccctgggtgagagtgatgaaatagtaggggattttccccttcttttcttattttctgtaattccattatattactttaataataaagaaaaaaacataaaaaataaacgaatgttattattctacgtcagtttggatgtttggactccattttggggttctttccattatatcacttggtctgctaaacattctacggtttggtaaggtgaagtgattcatgaaattttggttttatttttttcctgatactaaaaataaaacattctttcacttggaaatttggacacagaacaccaaaaaaaatccataatctcatctctctttttctgtcttttccttccttttttccctttaaaaacaataaagagtgaaacctacctgttctccctctaatttaattcctaaatataatcactgtcaatatcttggacatttcctgtgt

SEQ ID NO: 742 - DNA, 474 bp, synthetic construct
  misc_feature 1..474: note = Description of artificial sequence: synthetic polynucleotide sequence
  source 1..474: mol_type = other DNA
ctaaacacacacacacacttttttttttcagcaaaagtggatttctgctacatgtagtgttctgcaacttactttctatgtgtttacaaaatcagtacatgtacatatgctgaattcagtccttaatggtattatattttgtgaatataccaaaatttgtttaaccacttagacaatctaggatattctcagtttgctgttatgagcaatgctcttcctttacatatacagacatatatatatatatgtgtgtgtgtgtgtttttgttttagtaggatagatttctaggagagggtgaaaggtcttatgacatccgcatttacgattgtaataggaagtatcaaagtgccccctaaagaaaaaaatcctcccattagtgggtaagaaagcctatttgttcatatcttcacaaacactaaatattagaaatatttacaattgtggtcaagctcataagtgaaaatggtatttcat

SEQ ID NO: 743 - DNA, 475 bp, synthetic construct
  misc_feature 1..475: note = Description of artificial sequence: synthetic polynucleotide sequence
  source 1..475: mol_type = other DNA
atcttatattttttattgtgagattgaacatctttcatatgtttacatgtcacctgtatttcttattctctgaactatatgttatgacctttcactttttttcctcatgggttatgtgtagtttgtatagttgtcttattgattgttaggagctatttatatattaggaacattaatctcctgtcttatatatacgtggcatcgattagttgatcatttgtgagttcatgtctgtatacaaagattggagaggcactaagagggaaaacttacctctttcttatcaaagtttgtaaatatatgtataacagaagagggagaaaatattaataaatgcacagattggctgaaatagagtataaatcttttactcccctacttcaacataaactgcaaaaggagagtgacttttctttcactctgacttccgtattcctcatgcttaaaatagtgcctagcacagaagaggtgctca

SEQ ID NO: 744 - DNA, 475 bp, synthetic construct
  misc_feature 1..475: note = Description of artificial sequence: synthetic polynucleotide sequence
  source 1..475: mol_type = other DNA
atcagtgtttgctaaacgaaataattagtcacatttcaagcaggatgactaaatgaagaatagaatctaggcagatactctggaagagtggctgtgagtcattcatatcttagtatgaattagtcaaatccaactctctccccttcccactccccactgttagtagaagaatctgtttattgagagaatagatttataatttagaataagtgagaggggcagaagaggagattttgaaggatggcacctgaaggaggactagcatggctgagacagtgaagtggaagccttgaatagctaaagggtaagatgaaagtatttagctgtagggggaaaaagcattgacaggttggaaaagtaaaagtcagattctccttgctctgaaattttgtacagggcaggttctactaggtatgttacaatgcagaaaaaacatgaaataattgagaggaatttggtgcaatattatcttctt

SEQ ID NO: 745 - DNA, 380 bp, synthetic construct
  misc_feature 1..380: note = Description of artificial sequence: synthetic polynucleotide sequence
  source 1..380: mol_type = other DNA
ggcttcttttgagtgggcagatttttttcacggcctgtaactataataaatttgaaacttctcatcttttagtaacttttttcacttaagtttatgtggctgtgggcaatggaatgaagatattgaacttccaattccctgttgggtttccacaattacaagtcaatcatgactggttattagaagactatttcagttagaaccaccaagtcccatattgtcatattgtatgtttaattattaagtgaagcagtcttcttttcgtgttttccataattagggcattccagaaagatgaggatatttgctgtctttatattcatgacctactggcatttgctgaacggtaagacaccaaatccttccattaggttctatat

SEQ ID NO: 746 - DNA, 343 bp, synthetic construct
  misc_feature 1..343: note = Description of artificial sequence: synthetic polynucleotide sequence
  source 1..343: mol_type = other DNA
gcatttactgtcacggttcccaaggacctatatgtggtagagtatggtagcaatatgacaattgaatgcaaattcccagtagaaaaacaattagacctggctgcactaattgtctattgggaaatggaggataagaacattattcaatttgtgcatggagaggaagacctgaaggttcagcatagtagctacagacagagggcccggctgttgaaggaccagctctccctgggaaatgctgcacttcagatcacagatgtgaaattgcaggatgcaggggtgtaccgctgcatgatcagctatggtggtgccgactacaagcgaattactgtgaaagtcaatg

SEQ ID NO: 747 - DNA, 289 bp, synthetic construct
  misc_feature 1..289: note = Description of artificial sequence: synthetic polynucleotide sequence
  source 1..289: mol_type = other DNA
gccccatacaacaaaatcaaccaaagaattttggttgtggatccagtcacctctgaacatgaactgacatgtcaggctgagggctaccccaaggccgaagtcatctggacaagcagtgaccatcaagtcctgagtggtaagaccaccaccaccaattccaagagagaggagaagcttttcaatgtgaccagcacactgagaatcaacacaacaactaatgagattttctactgcacttttaggagattagatcctgaggaaaaccatacagctgaattggtcatcccag

SEQ ID NO: 748 - DNA, 121 bp, synthetic construct
  misc_feature 1..121: note = Description of artificial sequence: synthetic polynucleotide sequence
  source 1..121: mol_type = other DNA
ttttcagaactacctctggcacatcctccaaatgaaaggactcacttggtaattctgggagccatcttattatgccttggtgtagcactgacattcatcttccgtttaagaaaaggtagta

SEQ ID NO: 749 - DNA, 121 bp, synthetic construct
  misc_feature 1..121: note = Description of artificial sequence: synthetic polynucleotide sequence
  source 1..121: mol_type = other DNA
atggaaataaaaatgatttctttttctcaagggagaatgatggatgtgaaaaaatgtggcatccaagatacaaactcaaagaagcaaagtggtaagaatatcagaaggaattgggaagtaa

SEQ ID NO: 750 - DNA, 560 bp, synthetic construct
  misc_feature 1..560: note = Description of artificial sequence: synthetic polynucleotide sequence
  source 1..560: mol_type = other DNA
ttccccagaccacttcccatgaaattaatatactattatcactctccagatacacatttggaggagacgtaatccagcattggaacttctgatcttcaagcagggattctcaacctgtggtttaggggttcatcggggctgagcgtgacaagaggaaggaatgggcccgtgggatgcaggcaatgtgggacttaaaaggcccaagcactgaaaatggaacctggcgaaagcagaggaggagaatgaagaaagatggagtcaaacagggagcctggagggagaccttgatactttcaaatgcctgaggggctcatcgacgcctgtgacagggagaaaggatacttctgaacaaggagcctccaagcaaatcatccattgctcatcctaggaagacgggttgagaatccctaatttgagggtcagttcctgcagaagtgccctttgcctccactcaatgcctcaatttgttttctgcatgactgagagtctcagtgttggaacgggacagtatttatgtatgagtttttcctatttattttgagtctgtgaggtcttcttgt

SEQ ID NO: 751 - DNA, 474 bp, synthetic construct
  misc_feature 1..474: note = Description of artificial sequence: synthetic polynucleotide sequence
  source 1..474: mol_type = other DNA
catgtgagtgtggttgtgaatgatttcttttgaagatatattgtagtagatgttacaattttgtcgccaaactaaacttgctgcttaatgatttgctcacatctagtaaaacatggagtatttgtaaggtgcttggtctcctctataactacaagtatacattggaagcataaagatcaaaccgttggttgcataggatgtcacctttatttaacccattaatactctggttgacctaatcttattctcagacctcaagtgtctgtgcagtatctgttccatttaaatatcagctttacaattatgtggtagcctacacacataatctcatttcatcgctgtaaccaccctgttgtgataaccactattattttacccatcgtacagctgaggaagcaaacagattaagtaacttgcccaaaccagtaaatagcagacctcagactgccacccactgtccttttataatacaat

SEQ ID NO: 752 - DNA, 477 bp, synthetic construct
  misc_feature 1..477: note = Description of artificial sequence: synthetic polynucleotide sequence
  source 1..477: mol_type = other DNA
ttacagctatattttactttaagcaattcttttattcaaaaaccatttattaagtgcccttgcaatatcaatcgctgtgccaggcattgaatctacagatgtgagcaagacaaagtacctgtcctcaaggagctcatagtataatgaggagattaacaagaaaatgtattattacaatttagtccagtgtcatagcataaggatgatgcgaggggaaaacccgagcagtgttgccaagaggaggaaataggccaatgtggtctgggacggttggatatacttaaacatcttaataatcagagtaattttcatttacaaagagaggtcggtacttaaaataaccctgaaaaataacactggaattccttttctagcattatatttattcctgatttgcctttgccatataatctaatgcttgtttatatagtgtctggtattgtttaacagttctgtcttttctatttaaatgccact

SEQ ID NO: 753 - DNA, 476 bp, synthetic construct
  misc_feature 1..476: note = Description of artificial sequence: synthetic polynucleotide sequence
  source 1..476: mol_type = other DNA
aaattttaaattcatacctttccatgattcaaaattcaaaagatcccatgggagatggttggaaaatctccacttcatcctccaagccattcaagtttcctttccagaagcaactgctactgcctttcattcatatgttcttctaaagatagtctacatttggaaatgtatgttaaaagcacgtatttttaaaatttttttcctaaatagtaacacattgtatgtctgctgtgtactttgctatttttatttattttagtgtttcttatatagcagatggaatgaatttgaagttcccagggctgaggatccatgccttctttgtttctaagttatctttcccatagcttttcattatctttcatatgatccagtatatgttaaatatgtcctacatatacatttagacaaccaccatttgttaagtatttgctctaggacagagtttggatttgtttatgtttgctcaaaaggag

SEQ ID NO: 754 - DNA, 476 bp, synthetic construct
  misc_feature 1..476: note = Description of artificial sequence: synthetic polynucleotide sequence
  source 1..476: mol_type = other DNA
acccatgggctctccagggtgcactgagtcaatctagtcctaaaaagcaatcttattattaactctgtatgacagaatcatgtctggaacttttgttttctgctttctgtcaagtataaacttcactttgatgctgtacttgcaaaatcacattttctttctggaaattccggcagtgtaccttgactgctagctaccctgtgccagaaaagcctcattcgttgtgcttgaacccttgaatgccaccagctgtcatcactacacagccctcctaagaggcttcctggaggtttcgagattcagatgccctgggagatcccagagtttcctttccctcttggccatattctggtgtcaatgacaaggagtaccttggctttgccacatgtcaaggctgaagaaacagtgtctccaacagagctccttgtgttatctgtttgtacatgtgcatttgtacagtaattggtgtgacagtg

SEQ ID NO: 755 - DNA, 475 bp, synthetic construct
  misc_feature 1..475: note = Description of artificial sequence: synthetic polynucleotide sequence
  source 1..475: mol_type = other DNA
ttctttgtgtgaattacaggcaagaattgtggctgagcaaggcacatagtctactcagtctattcctaagtcctaactcctccttgtggtgttggatttgtaaggcactttatcccttttgtctcatgtttcatcgtaaatggcataggcagagatgatacctaattctgcatttgattgtcactttttgtacctgcattaatttaataaaatattcttatttattttgttacttggtacaccagcatgtccattttcttgtttattttgtgtttaataaaatgttcagtttaacatcccagtggagaaagttacttggaatatttgcagccttgttcctagttcttttttcattgcttatacagcatgtttttatacagcatgcttttgaatcctgcacaatgaaaaaagtatcaaaagattttattttaaaaaagaatgtattgaaaattttcattctctctcattcggcagc

SEQ ID NO: 756 - DNA, 477 bp, synthetic construct
  misc_feature 1..477: note = Description of artificial sequence: synthetic polynucleotide sequence
  source 1..477: mol_type = other DNA
ttcctttaggaccataccaagaagagtcaaaatcctgtcatctacattgaagatctaagggagagagggtgggagagaaggagtggaacccaatagaactatagggaaacaaagggacttacctctaagaaagtacttttcccagatctgtaaacgggtatgcaatccagtgtgtaggaagatagatgtattgcagtcttcaagttttgaaaataaagcgaggaaactagaactaagccaagttgaggattaagggctagcaatggttaggaccatagatctgtggttttaaacaagcatgacaaaacttatcattcaaggaagtatagaccttttaatgtgtcatccggtgagattttagtcatgaaattccattttaaaagactatcacttatttgaatcagatactcttaaaggattataatggctatttctaagaatatgtgtttgactctagatgcttttgtttgtttgttt

SEQ ID NO: 757 - DNA, 360 bp, synthetic construct
  misc_feature 1..360: note = Description of artificial sequence: synthetic polynucleotide sequence
  source 1..360: mol_type = other DNA
ctcccaaagggctgggattacaggtgtgagccacggtgcctggcctctggatgttttcagtagtaatgatgatgcactatttatgctagcccttgggcagtcaaagcaataaaaatgtgtgctagacatcaagatatctggccttcctaatcaggaaaggatatggagaactagtcttcctggcttgccttggtggtatggaaattttgtgacacttgaggggtctgtattatagaaaagttaatatgaaaatggttcataagctttcattaaacttttgttctagtcccttttacaagtgtgtgcctgtctgccacaagtaggcctaatatattttttaagttttatttttaattgaca

SEQ ID NO: 758 - DNA, 241 bp, synthetic construct
  misc_feature 1..241: note = Description of artificial sequence: synthetic polynucleotide sequence
  source 1..241: mol_type = other DNA
gagctatagactggagctgttcctatttggccatcttggaatctccctacccattttccataattgacatatttatagggtacagtgtaatgttttgatagaagtatacattgtgtaattatcaaatcagggtaattagcatattcttttcctcaaatatttatcatttatttgtgataagaacattcaaaatattctctcctagttattttgagttatacagtataatactgttaaccac

SEQ ID NO: 759 - DNA, 121 bp, synthetic construct
  misc_feature 1..121: note = Description of artificial sequence: synthetic polynucleotide sequence
  source 1..121: mol_type = other DNA
aggaaactcacaatcatggtggaaggggaagcagtcaccttcctcacaaggcagtaagaggagagagagcaaagagggaagagccctttatgaaactatcagctcttatgagaattaactc

SEQ ID NO: 760 - DNA, 361 bp, synthetic construct
  misc_feature 1..361: note = Description of artificial sequence: synthetic polynucleotide sequence
  source 1..361: mol_type = other DNA
ttgtgtgaggacagagccaaactgtatcaccctactatgcaatagaacaccagaacttattccttctatctaactataagtttgtacctgttgaccgatctctactaatctcccctcctcatgcccccaaccctctccagcctctggtaaccactaccctactttctacttctgtgatatcaaccttttaacattccacatatgagtgagatcatttagtatttgtgtttctttgcctggctatttcacttaacataattatcctctagttttatccatgttgccacaaatgacaggatttcatttgttatggctgaatactattctattttgtgtgtgtgtgtgtgtgtgtgtgtgtgtg

SEQ ID NO: 761 - DNA, 240 bp, synthetic construct
  misc_feature 1..240: note = Description of artificial sequence: synthetic polynucleotide sequence
  source 1..240: mol_type = other DNA
agctgggaatataggcacatgccactgcacctggcttatataccaccttttcctcatccattcatctgttgatggacacttaagttgattccatagcttcactattgtgaatagtgctgcaataaacctagcagtgtagatgtctatttatgtctttatttatttaactattttatttatttattctttatttaactattttaaagctgagaaattcaaaattaacttttgttctattga

SEQ ID NO: 762 - DNA, 478 bp, synthetic construct
  misc_feature 1..478: note = Description of artificial sequence: synthetic polynucleotide sequence
  source 1..478: mol_type = other DNA
tatatttggccaaatttgttaagacagatacacctgtttttagaatttttcctatcccaggcttccaaagtttcaagaaaattgatataataaaccaacttattcccattataatttaaacatttccgaaattatttccattttaaaagaagttaatgtttgaccaatgaagcaattgtcaatgatggggttttattatgagtttaataatgatatttaccatttattgagcatgtaccttatgcaaggtcttcatctgtcaatcatctcttctttctgcaaatacaagacttagcaagcttggagtaagttatgaatgctaacatatgtgagatcaaatagtctctttctagggcactgaaggtctttggggacttaaaaactcgattacaatgattcagtcatataagagaaaattgcaacacacacacacacataaaacagaaaagaactatttgtacatgccaggaaacactgc

SEQ ID NO: 763 - DNA, 480 bp, synthetic construct
  misc_feature 1..480: note = Description of artificial sequence: synthetic polynucleotide sequence
  source 1..480: mol_type = other DNA
tctaagagttgctttattctaggtgactatgaaaggaaaaaaaaaatctaactatagagaagttaaaaaatgtacatatatttgggaagaataggaaatttcaccaaaggcctggagtcactcaaacccgagttccaatcttcttagatgtaaattaacttcattgaaccagtttactttaaaaattcttgtttttattaaaaatttcaattactattaaaattatatttttaattaaaaatactttaaaaattaaagtgtatagtttttctatttatcttaaatattcaaataattgtgaattaaagttgtgccagcttgaagatttaaagtgataggcttaataattttggaacttttcttaatgtcaaagttaactagagcttcttttctttttcaaattacacatttaaaattccggcatcagttcctttttgagtcatctaggtctctcacgtcagtaaatattgagctactgta

SEQ ID NO: 764 - DNA, 240 bp, synthetic construct
  misc_feature 1..240: note = Description of artificial sequence: synthetic polynucleotide sequence
  source 1..240: mol_type = other DNA
aagctgaagttacttacgtagtaacataacttacttaggggagatttgtaaatgtttattttggataagctatgtcttatttttgttttgcttttgagaaagatacttctcattctttgctaatttcaaacaaacagctttatagtagaaagcaattatttctataactcaagttaaataattctgtctattctttagtcaaattgaaaataagacataacaaaacaatgacccccttgc

SEQ ID NO: 765 - DNA, 241 bp, synthetic construct
  misc_feature 1..241: note = Description of artificial sequence: synthetic polynucleotide sequence
  source 1..241: mol_type = other DNA
cttggtttctaacttttcagaggtgaacacaaccataaatggtaactaacttacagtagtgcctactgtatccactaagcattatgtagaatacagaggtgacccagacatgcaccctgcccttaaaaaacatgaagattgaaacatattatcatgatttacaggcatagctcctcctcctccaaaaacaaaacaatacaaaacacacaaataactgtgtttgtcagaaatacagacacca

SEQ ID NO: 766 - DNA, 240 bp, synthetic construct
  misc_feature 1..240: note = Description of artificial sequence: synthetic polynucleotide sequence
  source 1..240: mol_type = other DNA
agtgttaaaatgtcagaaaatagggcagcttgaactcaacctttgcactctctagcacttgaattatattttatcaaacctttgttaagttagttcatgtattttggtgcctcagtggttctaatccaagtatagtatttttgtagatccatctgtcccagtgctgcataacagcactagaacatgtggaagagatttaacaaatagtattagctatgatatgtatatattagtatatat

SEQ ID NO: 767 - DNA, 240 bp, synthetic construct
  misc_feature 1..240: note = Description of artificial sequence: synthetic polynucleotide sequence
  source 1..240: mol_type = other DNA
tacatgtcaggaagtgttctgagttctttacgtgtactaattcatttagccttcccaataaccctatgcggaaagttattaccatcttctcttgacagataaagaaaccaagccacagaaagtttaggtaacttggccgaagtcatgctactaataagttatggccccaggatgtgagcacagtttgacttcacagtttgctcttataccctacactatgctacccctaaataattattc

SEQ ID NO: 768 - DNA, 479 bp, synthetic construct
  misc_feature 1..479: note = Description of artificial sequence: synthetic polynucleotide sequence
  source 1..479: mol_type = other DNA
gagtcatgttaatgaggggattttaaaaacttgacagtattggaacagtatatatagtaagctgatacttccctgggttggacaactccagaagcaatctgatgtttgtttgcctgtatatttttgtttttctaggcaatgggggctaatctcactagtacttctgtagactgtctagcatatgtctttcggtgaatctttgaactcgttttccatttggtatatatctgatggtacaattgctgaattcttggtatatacataagaatagaatttctaggtcatggtataggattgctggaaactgtaccaatttgcattcccaccagcagggcataggagttccagttgccttgcatttttcccaatattttctgcctctttcattttaggtgactatgcagagacatcacattttggttttaatttgcatgactctgatgactaatggagtcaaactcattttcatatatttattg

SEQ ID NO: 769 - DNA, 480 bp, synthetic construct
  misc_feature 1..480: note = Description of artificial sequence: synthetic polynucleotide sequence
  source 1..480: mol_type = other DNA
gccatttgtcaataaagttttatgaggtgtcttttcaagtgatttgcccattttttaaattaggttttctgcctaattcctaattgtgtaggaattcttagcgtattctagatacaagcccttcgtcagagacataaactgaaaatctcttctcccattctgcaggatgtctgttctctcttcacggagtcttttgaggaagtgaagttcttactttacatagttcaatttaccaatttttttcctcatggctagcacttttttgtgtcctgtgtaagcaaactttgcctactccaaggtcatgaagatttcttccatgttttcttctaaatctctatcattttatttttcacatttagatctgtaatccttctggaattatttttttgcatatggtgtgagataggagttaaaatacattttcatgtggacattcaattgtccctacaccatttactgaaaataccatcctttccccca

SEQ ID NO: 770 - DNA, 360 bp, synthetic construct
  misc_feature 1..360: note = Description of artificial sequence: synthetic polynucleotide sequence
  source 1..360: mol_type = other DNA
ctatactgcagtgtcacctttctcataaactagttgactatatctatacctatgtctctatctatgtctatctacctacctgtatatatctgtttatggagtctgttctattacattgatcagctcatttgttttttttttttgtctagaaaattttgctaaagcagtattaatgagtttgaatcttgcctcttggggctgtgacaacacttcaggttgtgattcctcacctgcagccctatccatgccatggcaaccaccgaggcatccatcctgtggttatctatacaatgcataataaagacctcagctggcctcggcggctcacgcctgtaatcccagcactttgggaggccaagg

SEQ ID NO: 771 - DNA, 240 bp, synthetic construct
  misc_feature 1..240: note = Description of artificial sequence: synthetic polynucleotide sequence
  source 1..240: mol_type = other DNA
aaaaaaagataacctctatctcccactgctttcccttcccaccgtcaccccaagtttctgtcatttctttgaatttgttatttgactttccacaagtataaaagtacacttgtatcatttattttaggtattggatatcttcccttccttatgtattattttaaaagcagctaaataaaaaatttagcttggtttttgttgttgttgttgttgttttgtttttttggttttttgagacgg

SEQ ID NO: 772 - DNA, 240 bp, synthetic construct
  misc_feature 1..240: note = Description of artificial sequence: synthetic polynucleotide sequence
  source 1..240: mol_type = other DNA
tgcatgccaccacgcttggctaatttttttttttttgtatttttagtagagacggggtttaatgtagccttcaaataatttttttaactataaattcagtggcttttgatttttcaaaaagagtctccactcttacctaaaactacaatgggtatttgaattctagaaggaggtgattttattccaaactgataatcactataaaacattatgtcttttctactggaaatagaaatacag

SEQ ID NO: 773 - DNA, 241 bp, synthetic construct
  misc_feature 1..241: note = Description of artificial sequence: synthetic polynucleotide sequence
  source 1..241: mol_type = other DNA
tgtatatagatgtttgttagacatctctaataaaaaaatgagtattgtatataactgagccttcctagaatgtttgcccacagccacagtgttatagcagttcatattatctctctcatggtcacatgttagaagtagagtcatgtagcagtatgcaagcaaatcccctgttgggatgcctgttggcttcagattagctcacttactgggcaaaacagagactatgggcaatgcccaacat

SEQ ID NO: 774 - DNA, 240 bp, synthetic construct
  misc_feature 1..240: note = Description of artificial sequence: synthetic polynucleotide sequence
  source 1..240: mol_type = other DNA
ttcctcatttctcataatggcttatcaaattcccagtcacaagagctaaaaccttagaacaatcttttactcttccctcttccccatggcacagctttaacatcgactgaagcttcttttatagaattgtttctccggttccttttttgtgaatttattgttactattctctctcaaacttcatataggatgttgacagtgacttaagcaataagaaagattatcacataaaacaaaaca

SEQ ID NO: 775 - DNA, 241 bp, synthetic construct
  misc_feature 1..241: note = Description of artificial sequence: synthetic polynucleotide sequence
  source 1..241: mol_type = other DNA
aaacaaacaaacaacagcaacaacaacaaaaaatatatatatacacacacacaggtaggatggccctgtccctgcttctctgcgatcctctttgttctaccctactggtggatctatacccaaactggcagcaagatagcttggcagttccaggttacacctagcagaccacatctcatgtctcactggccagagtcaggtcacatacccatctttaagacagttgttggcaaggatttac

SEQ ID NO: 776 - DNA, 239 bp, synthetic construct
  misc_feature 1..239: note = Description of artificial sequence: synthetic polynucleotide sequence
  source 1..239: mol_type = other DNA
cctggagccagggatgaaaccatcttcccctgagtcacatgggaaaggacacctgaacaaaattagcgtcttgtcaccatagggaatgggctctgaatgctggtggataatcaacagtgtcagctccagactctaaccacttcacttagataactgcagccacctcttaactgtggtccctgcctccagtttttggctccatcttctcaacatgtataatgaagccagtacaattctcc

SEQ ID NO: 777 - DNA, 240 bp, synthetic construct
  misc_feature 1..240: note = Description of artificial sequence: synthetic polynucleotide sequence
  source 1..240: mol_type = other DNA
ttaaacacactgctgtcatgacagcactttcttggtcagggggcctaggtggcttcactgtgactgatggacaaaattcgaacaccttggcctccccattcaagatgtccacaaccagactccaacctatcccttatccttccttctccctagttccttacaacaggggtggtagtaaatatatcaggctttgtggaccatgtggtctctgtcacaattacagtaatattcccctcatct

SEQ ID NO: 778 - DNA, 121 bp, synthetic construct
  misc_feature 1..121: note = Description of artificial sequence: synthetic polynucleotide sequence
  source 1..121: mol_type = other DNA
gtacagtagaataagttgttctgagaagaagaaggagaaagagagagagaccacattcataccacctttattacagtacgttgttataattgtcctttttttttttttttttttaactctt

SEQ ID NO: 779 - DNA, 360 bp, synthetic construct
  misc_feature 1..360: note = Description of artificial sequence: synthetic polynucleotide sequence
  source 1..360: mol_type = other DNA
tattttattagtagtaattgttgttaatctcttactgtgcctaatgtataaactttatcttttctttgcttatctgtctttccacaagtataaaagtatacttttaccatttattttatgtattggatatctctctaaacaaatcacaggtatgtatgcataggaaaaaacacagtatgtgtagggtttggtactatgcacagtttcaggcattcacttggggatcttggaacataacccctgcagataaggaggggactactgtagtcaattcttcccttgtagtgcaaaagcagccatgcacaatacaatacaaatgaatgtgactgtattccaataaaactttatttacgaaacagg

SEQ ID NO: 780 - DNA, 121 bp, synthetic construct
  misc_feature 1..121: note = Description of artificial sequence: synthetic polynucleotide sequence
  source 1..121: mol_type = other DNA
cagtaaactaaatttggcccacaggacacactttaacaatccctgccttacatgaaatcccttactccactaggccctaagttggtaaaatcaacactccattggagccacaaagatgaca

SEQ ID NO: 781 - DNA, 359 bp, synthetic construct
  misc_feature 1..359: note = Description of artificial sequence: synthetic polynucleotide sequence
  source 1..359: mol_type = other DNA
acataatggtatggggaagtcctacctacacaggacatctggcagggtccgggcttcatgtctgacatatcgtcaagagttacattggcaatgagactagttttcgtaaatttattcagtttgatcattcagctgattcaaagatcaaaagatcctttagggctgtgttttctgacctttttaaggctgtggtacatggatttgttaggctaactgagacaaataaatgagtttgtctcttcactatgctgataataccttggcaagtcatcagtcaagctctttttctcacccttacccccagatctacaccctgctcctacaatcttatctctgtctccttctcccttctaaaagaa

SEQ ID NO: 782 - DNA, 479 bp, synthetic construct
  misc_feature 1..479: note = Description of artificial sequence: synthetic polynucleotide sequence
  source 1..479: mol_type = other DNA
acctgatgaaacaaaaagaagaaacccagagataataatacacccaagatcatactgatagacctacatgtgccaaacattggttgagaaataatgtcttgtgatccacaataatcagtaccaaaaatccaagtacttcacgcggtcttaggaaacaaatatgtgggaaaggctgaggcttggcttatttagttagcttttgttttagaactacataaacagagagtgtaaatagtaacctgattaaaaatacggactttagggttagtttatctgggtttgaattctggttctgctgcttcctgtttatctgacctttggtaagtgacttaacttctttgtgtctctatttcttcatctacgtatctgacccagagagttgttaggataattatgtgaattaatatgtgcaaaaatttaaaaatagggcctatcacattgttaacagcatatatgagttggtaaaaggatatatatat

SEQ ID NO: 783 - DNA, 121 bp, synthetic construct
  misc_feature 1..121: note = Description of artificial sequence: synthetic polynucleotide sequence
  source 1..121: mol_type = other DNA
atgttgcgtcttaggcatggagtaaaattcatgtaaacaaaaaaacagagtgaatattcacttaggcaggcagtctgctccatgtaatcattcaaggattcagatagacaacggctctgcc

SEQ ID NO: 784 - DNA, 358 bp, synthetic construct
  misc_feature 1..358: note = Description of artificial sequence: synthetic polynucleotide sequence
  source 1..358: mol_type = other DNA
atcttcaacatgtggtcttcaaattttccctggaggtctccatacagttaaatagactagaagggcatacagaatctcagtgggagatttttatgcgctagatttaggaatgatgcgcataatttcctttcacattccattagttagaatttagtcacatgaccataacctaatcccaagggagactggaaaatgtagggtagcttcccaggaggaagaggagtatatagatttgatggaagacctatcagaattggttataactgagtatctggacaacaccatattggtactggtatcctagcaagaaaagtgtacattgaattgtagtatctatagtgccattagcctttcatga

SEQ ID NO: 785 - DNA, 121 bp, synthetic construct
  misc_feature 1..121: note = Description of artificial sequence: synthetic polynucleotide sequence
  source 1..121: mol_type = other DNA
agttattttaataaaacaacttttttgaaactagttattaaatacggtctaaaaataatgatgaggaactctttatttcattacctagtgtgctttctaaagaacactaggaaaaatttcc

SEQ ID NO: 786 - DNA, 359 bp, synthetic construct
  misc_feature 1..359: note = Description of artificial sequence: synthetic polynucleotide sequence
  source 1..359: mol_type = other DNA
ctttgaccttaatacaaacacacaaacacaaaatagttgtgtttccccgagtgaaaagttgcttagctttgcccctgctccccaaatcttggaaatattattaattgtttaactgtccaagcttggcttagaaagcttagaatcaattttattctttcactcaactaatttactgagcatttactacatgtcaaacttcaagctagacactgaggattcaagagggaacaagacagacatggttcttgccctcatggaattcacattctaataaggggtcaaggaagtggatgtgtggaaacatataacgaataaacaaatgactatataaatgcagcaataccaatcaataagggacc

SEQ ID NO: 787 - DNA, 360 bp, synthetic construct
  misc_feature 1..360: note = Description of artificial sequence: synthetic polynucleotide sequence
  source 1..360: mol_type = other DNA
aagctaaataattgccaaattgggaaccaattttaaatgggatggctgggacaggggcttcttcaaaaaggttgaatttaaaccgagccagccatacaaaagggcgtacccccagcaggaggcacaatgtgcacaggagctttgatgagagattgagttaaggagttcaagggctagaaaggaggccagggtgactagagagtggagagcagagcagggaggggcacaagatgagactgtgcatcacgcaggcccgtgacagccatggtgaagagtccaaattctgttctaaatgcggtgggaagtggttgcaagtttttgtttgtttgtttttgtttttgttttgagacagagtctcgc

SEQ ID NO: 788 - DNA, 479 bp, synthetic construct
  misc_feature 1..479: note = Description of artificial sequence: synthetic polynucleotide sequence
  source 1..479: mol_type = other DNA
tacaggcgtgagccaccgtgcccggtcagttgcaagttttaagtagggggaaatgattgatccagcttgtgttatgagatcatttgggctgcagtgtggaggaagaactaaaaggacatggaagcaggaggacagccaggtgatgggtgtcgtaagcctgggaaatgtgatggtaatacaagcatgtcaagcccgcagatcctgacagtaagcatgccttcctgacttgtgcccggggagaggaggcgacagtgattctgacctcttcttatttccctccctttctagcgccactttcctgagcttttttactgtatgttatgtataccgtatgctgtatgctgtatgctgtatgctgtatctaacagcccttgtaaacagccttaaatcctttctaaacatcctggatagtcctagaatcctagaatatggattctttcttggtttcaaaactgatttcattatattgcatggaaaga

SEQ ID NO: 789 - DNA, 478 bp, synthetic construct
  misc_feature 1..478: note = Description of artificial sequence: synthetic polynucleotide sequence
  source 1..478: mol_type = other DNA
agaaatgtctttattgtagagtgttggtatttctgggtaggttgattcaaagattaagttgtgagggcagttgggacttttagagaaagtggatctagaaaatctaaattgttactaagaaatattgatgaatgtaggtcatggagctcagaaagaagtatctctttgatatttttcctaaactatgtgaaagggaagcaatgggaaatttcgtgaacggagtcaggaaagcctcaagttgggtggctaggaagggtagaggagttgctattagggaaccgaggagtgaatgtggagatggtgaagtgagacaggaggctgcttcctcaaaagtcaggacagttatgagaatgctctggtttgaatgtcaagatgttactggaaatgaataactacaaatacacgcatgttcatgcacacacacatacacaaacacatgaagctattgaaaagaatatgcagcaaatgtgttttgtaa

SEQ ID NO: 790 - DNA, 241 bp, synthetic construct
  misc_feature 1..241: note = Description of artificial sequence: synthetic polynucleotide sequence
  source 1..241: mol_type = other DNA
gtgagctagtatctagttgaagtaccatgatcatctttaaaatctcttgctagaagaggaatgttgactgcccagtgtgggtgtggatagggaatgaatatcctcgctgtggtatccataattgaaatgcactgtgcctcatctccagaccagcccttacagcagtgccaatctccttcttgtccactgcacaatagctcgctgactctgcctactctttggtcagtttcccggatatcct

SEQ ID NO: 791 - DNA, 240 bp, synthetic construct
  misc_feature 1..240: note = Description of artificial sequence: synthetic polynucleotide sequence
  source 1..240: mol_type = other DNA
tgtctcttcattcttagtacatcacatcattactcaggcctcttgcctgggcccctggcagctttaggtacctcattcagcgcaactgttttcctgttttcttgagcagtgaggtcataatttcatgaccttggatacacattgcgtgaagtaaaatgtttattaagtcagatgaattaataacattttcaggaagttcataattgatggagacaaattacatatgtaccatacatcaac

SEQ ID NO: 792 - DNA, 241 bp, synthetic construct
  misc_feature 1..241: note = Description of artificial sequence: synthetic polynucleotide sequence
  source 1..241: mol_type = other DNA
acacacacacacagaatgtgcacactcaggagagattaatagtgtgtatgtttattagatataaagcagctgtagcctatgaagaaaggacagaagaaacagcgaggtacaggaactagagtcgacaaagaagaaaagcaaagatgcccacatacatcctacttttaatgcaaagcttgtctctgctggataacatcacaaatcccccaactaaaatcaccaattgttctgtccctaaaga

SEQ ID NO: 793 - DNA, 239 bp, synthetic construct
  misc_feature 1..239: note = Description of artificial sequence: synthetic polynucleotide sequence
  source 1..239: mol_type = other DNA
tatctttctagttctcaatcccaggccaggtggggctctatttaactctcttttatttaatccacttttgatcactcttaggaagtttcactttactcaacaagctcaagattgatcacccttgactttatctgtttatcttaggagtgtttggttgaagacagaaccacagatgcccattattactagtattatcataacaataaagaggagcaatagtaaataaaggaaacccagag

SEQ ID NO: 794 - DNA, 241 bp, synthetic construct
  misc_feature 1..241: note = Description of artificial sequence: synthetic polynucleotide sequence
  source 1..241: mol_type = other DNA
ccagattatcgggacttaaatctgttttcccacttttgtgatgtttgaccttcagcaaattatctaccttctctatgcctccgtttccctattcataaaatggaaacaatgaaagtacctacctcgtagggtttttgtgagagttaaatgggttcatacacataaagtacttggatctgccctggcaatatttagacctctgtgaatagtaacctgtattactgcgtttcagttaggaatg

SEQ ID NO: 795 - DNA, 239 bp, synthetic construct
  misc_feature 1..239: note = Description of artificial sequence: synthetic polynucleotide sequence
  source 1..239: mol_type = other DNA
actaaatgttgcggcaaactgcacattctgttgacccttcctggtcactgctcacccatccgaagcctgtgtaatacaatattcaactctgaaactgcatctaaggtggccaggaaggaaagctggagggaaatgtgtagaccagctgacctctattttaggttgaaggtccaggcatttcctcccctttctctacctgtgagaggagccaaccagagctggccaagccatgatgcagc

SEQ ID NO: 796 - DNA, 240 bp, synthetic construct
  misc_feature 1..240: note = Description of artificial sequence: synthetic polynucleotide sequence
  source 1..240: mol_type = other DNA
ccctcgtgtggccatttccttcccagcctctattcatcttttaccactctctagcagcagaagctggtgggttgtggttaccactcttgtttgttgccccacatcccagcttcattttctcaggatcactgccaggcaataaggaaagtttggggcctgaaaaaatctgccccaggcctgtgtagagcaaaatacccttggacattatacccgcagaaggttcctcaaaattatgtgaca

SEQ ID NO: 797 - DNA, 239 bp, synthetic construct
  misc_feature 1..239: note = Description of artificial sequence: synthetic polynucleotide sequence
  source 1..239: mol_type = other DNA
tttttcagctgatcgaacttccctaacctgacttcctggaaaagccaagaattcagagaaaatgtagggcactgacgaaccaatgaagaggtcagtaaattctcccggagtccccactcaggtctgaaaaatgttgtgtgaaacctgtgggtagggatagcctccaaatatttgccctcccacaactgtccataggcctagttgccctgccatagctaggtcccaaattgttgcaaaag

SEQ ID NO: 798 - DNA, 480 bp, synthetic construct
  misc_feature 1..480: note = Description of artificial sequence: synthetic polynucleotide sequence
  source 1..480: mol_type = other DNA
ccataaagccatatccatgtagattctgccaaaccagctaactggccaatctgttttcccacaacatgagttaccttactgggatgtgcgtcttcaggtatatgcacttggatccagttacagcaagttaccccaaggaaataatcagacaagggcatagagctgattgtgaagggtcattcatggtgcccatggttttgtaatatcaacacttacaaattagaagcaacctaaattgccatcactaggggatggcttaaacaaactatggcatacccatacaataaaatatttatcagtctttataaataatcatggggtctgtaattaccaacatggaaaaatgcccatgatacccttgaaaagtgataaaacagttcacggaattacattctgatataatggtacttattaaaattgcattctccagcctgggcgacagagcgagactccgtctcaaaaaaaaaaaaaaaaattgca

SEQ ID NO: 799 - DNA, 479 bp, synthetic construct
  misc_feature 1..479: note = Description of artificial sequence: synthetic polynucleotide sequence
  source 1..479: mol_type = other DNA
tcatatgaatggtacctattaaaattgcattgatatgcaattttaataagtaccattatatcagaatgtgtccagggatctacagaaaattatgttcacaaaaatactgacagcaattatctctgtggttgagtatttgggtaatatttactgttattttttacttttttttggtatttagaaaacacttagcaatgatacaatgtgctatctgaaaaaaactaaactttttaaaatataagtttgaggggaaaatgaactaagttagtaatgttttgggaataagatcatgggttggccacaccaagcaggtaatggcacaaggataagataattaacatttattaagcacttattacatgccagcaggccctgttctaagcactttccgtgtatcaactcatttcatttgcacaactccacaaagcaagtcttttatggtgcccattttacagataatgaaatgaaacaggcaccaa

SEQ ID NO: 800 - DNA, 240 bp, synthetic construct
  misc_feature 1..240: note = Description of artificial sequence: synthetic polynucleotide sequence
  source 1..240: mol_type = other DNA
gagaggaagccgtttgtttgaagtcttacggctggcaggaggtgaaacagagatttagacagaggtctgcttccaaaatctctgagcgtgacccctgtgctcccctgcatagggctggctttcctgcaggggaggagggaaggtgctgaggtcagaggaggagagaggaatgatggagggagtggagagggcagaggtggctgctgacgatggggaacaagacactgtcctcttccccct

SEQ ID NO: 801 - DNA, 239 bp, synthetic construct
  misc_feature 1..239: note = Description of artificial sequence: synthetic polynucleotide sequence
  source 1..239: mol_type = other DNA
gcagttcctgaaggatcttcattctcccactggccacctgtttacctaacccctctaaagcctcagtttcctcttttgtaaagtgagggagccttctcaggccattcaccttaattagttcctctctatgccatataaagtcctagaagccagttctgctgtggcacatatgcagccaccaccatcatcaccagcatcccacttccggctgagagacgcaggccccggtgtctcccagt

SEQ ID NO: 802 - DNA, 240 bp, synthetic construct
  misc_feature 1..240: note = Description of artificial sequence: synthetic polynucleotide sequence
  source 1..240: mol_type = other DNA
gtgcaagttgtcagagcaggctggaagagaattgggcattctctgtctctgctgtagaatgaccaccctgaaggataattctgctcacttgttattctcctcactggacaggagaccctggaagcagagacaatatctgatgcacctctgcattcccactacctggaacataaagtcgttcaataaataaacatcctctgttgaatgaataactggaaagtacagccatgtggccttatg

SEQ ID NO: 803 - DNA, 240 bp, synthetic construct
  misc_feature 1..240: note = Description of artificial sequence: synthetic polynucleotide sequence
  source 1..240: mol_type = other DNA
attccagagtaacaagtaggaaaagcaacacttgcatattaatttctttattttttgtttctgttttctaccttatctggcacagagttcagagtaggtacagtcattaaagaagtcactgatttttaacatgccacttaagcaaaaggagcaagaaggccctatttatgttgatcaactaattcaagaaattctgggcttttgttttttcttttcttttttctttttctttttcttttt

SEQ ID NO: 804 - DNA, 359 bp, synthetic construct
  misc_feature 1..359: note = Description of artificial sequence: synthetic polynucleotide sequence
  source 1..359: mol_type = other DNA
cccaccttggccatccaaagtgctgggattacaggtgtgagccaccacacccagccaaattctaggctttctatgtaaattataaaatgtaatttacaaaactctgttcagacattttatcaccaaggcagagagtggtcaaatcacagagctagtaaggagtagaaccaaatccagcttctctgcccttggtgtcaactgctttttctactttccacatagctccacccctccagccagtcacaatggtttctaaaagtggacctgcctttgcagttattcattcaacagaggatgtttatttattgagcaactttatgtttcaggtagtgggaatgcagaggtgcaccagatattgt

SEQ ID NO: 805 - DNA, 479 bp, synthetic construct
  misc_feature 1..479: note = Description of artificial sequence: synthetic polynucleotide sequence
  source 1..479: mol_type = other DNA
ctctgcttccagggtctcctgtccagtgaggagaacaacaagtgagcagaattatccctcaaggtggtctttctaagcagagacctgccttaattctgttgccttaggtgagatcaacttacttctgcatgcttccatttctcctcccccttggtagattgagaatcatggtatcagctcttcttagtgaaagaaaatctaagaaacatagacaggtgtccacatcttgaagtagctgaagtttgtctttgggttctcagcttccttttctccctcttgcttacttcccttcaaggattgctgccatcagtgtcatcaaacccagggattccctaatgctaatccaccaattagagcacggctggttactacagaaccactgatgagtttcaaaaaatgcagacttctggaccccacccttggagattttgaatcaggaggtcttaggtagtgcccaggcacctctatgtttcaggttc

SEQ ID NO: 806 - DNA, 480 bp, synthetic construct
  misc_feature 1..480: note = Description of artificial sequence: synthetic polynucleotide sequence
  source 1..480: mol_type = other DNA
cccaggggattctaacctgcagccatattggggaaccactgacctaacacgaaaacatgagtcagctgtctcaactgtattgaaagtgatgaatcatcatttcactttaaaaagaaaaaaatatgagctgaaaccaaagtcattgtgagaacctttcatttcctttacctgagtttgaattcaggtttcctttacttgagtttgagtttagaagtcttctatacttggtccaagcatttttacggagattcccaaggtcttaaggcaaacagacttaagacctgtcctcagtttagtcctgggaacatgctgtaaccctgatcagccctggctagggggaccctgggaaactggctggctctggagatccttcaggccagagttgctgggaaccacaccgggttcatcttacaccatgcctaggtgctggggtccaatagtcttgtctcctctggcttcccagagccagaactaggaaga

SEQ ID NO: 807 - DNA, 121 bp, synthetic construct
  misc_feature 1..121: note = Description of artificial sequence: synthetic polynucleotide sequence
  source 1..121: mol_type = other DNA
cgagaaggctttgggatatggctggcttccagagactgaatcagcaactcatattctcaagaccgaggtgggtaggcctgacacagaagggtcaggaggctgctagaatctatgacagggc

SEQ ID NO: 808 - DNA, 240 bp, synthetic construct
  misc_feature 1..240: note = Description of artificial sequence: synthetic polynucleotide sequence
  source 1..240: mol_type = other DNA
aggaacagcgctgaggcagcagaaactgagaaagcagaagtcaccagaaagagaaaagaagttcaaagtagagggaaagactgaggaaataagcagggtgagtcgaacagatgagatgtgcagagagaagcagatatgagctgagggagagagactcaatgaaccacgagaggtgggcaaagaaagcagccagtcctgaggttaccttgtttctgacagtttgggtcctgcccatccttt

SEQ ID NO: 809 - DNA, 479 bp, synthetic construct
  misc_feature 1..479: note = Description of artificial sequence: synthetic polynucleotide sequence
  source 1..479: mol_type = other DNA
ttcttgtcaggtttgtcaaagatcagatagttgtagataggctgcattatttctgagggctgcccatccttatatcaccaattcaattgaggagactcgaccaaatgttttatttttctaataactgttgccagtagtattctgggaaatccttctagcctgttgggcagtgagtgaccctcatcatatatcagtgcaatttcatgatttgtagatcacttattatgactcagtctagtcccatgttttctaatagcttttgagatctaattcatataccatgcaattcactcatttagagcaggggttcccaaaccctggactgtgaaccagtacccatccatggcctgttaggaactgggctgcacagcaggaggtgagcacccagcaaatgagcattaccacctgagctctacctcctgtcagatcagtggcagcattagattctcatagcagtgcaaatcctgttgtaaactgag

SEQ ID NO: 810 - DNA, 240 bp, synthetic construct
  misc_feature 1..240: note = Description of artificial sequence: synthetic polynucleotide sequence
  source 1..240: mol_type = other DNA
catgcaatggatctacgttgcttttcttatgagaatctaactaatgcctgatgatgtgaggtggaacagtttcatcccaaaaccatttccaccacccttcccacaatgcacggaaaaattgtctacgacgaaactggtccctggtgccaaaaaggttggggattgctgatttagagcatacctttcagtggtttttagtatatgcacagagttctgcaaccaacaatataattaattttg

SEQ ID NO: 811 - DNA, 239 bp, synthetic construct
  misc_feature 1..239: note = Description of artificial sequence: synthetic polynucleotide sequence
  source 1..239: mol_type = other DNA
aaatattttcatcatcccaaaatgaaatcccatccctctagcagtcaccccctagttcccctcattcctcccagtcttaagtaattatttcctgtctctatggatttgcctattctggacatttcgtctaaatggaatcatacaatatatacaatcttttgtgacaggcttctttcacatagcataatgttttcaaggttcacacacactgtatcacgtatcaggactgcattcatttc

SEQ ID NO: 812 - DNA, 240 bp, synthetic construct
  misc_feature 1..240: note = Description of artificial sequence: synthetic polynucleotide sequence
  source 1..240: mol_type = other DNA
taaagctgagatatattccattgtatggacatactgttttttattgtctcattcatcagtctctggacatctggtttgtttccaattttttgatactaagaataatgcttctatgaacattcatgcagacatttttgtgtgtacatttcatttcttttgaaatatacctaggagtagaacactgggtcgctatgtttaacattttgaggaagtgacagagttcatctcatttaaaattcc

SEQ ID NO: 813 - DNA, 240 bp, synthetic construct
  misc_feature 1..240: note = Description of artificial sequence: synthetic polynucleotide sequence
  source 1..240: mol_type = other DNA
aatcccatattttacaaatatgagatattttacaaatatctctcctcccagaataggtgaaacttatgaccctgcaatcttcaagttgggcagagaaatggctcaggtctcaggcggttgcagtctaagggtagtggcctgtgataatggctggggcctcccatgcctttggcttccttctcttctgcatcacacgaagccatagtaactgttggggtttttggtcatccttgaggactc

SEQ ID NO: 814 - DNA, 240 bp, synthetic construct
  misc_feature 1..240: note = Description of artificial sequence: synthetic polynucleotide sequence
  source 1..240: mol_type = other DNA
aggagcctgggatgtgaatgatatccccattttcttcattcctgaaaataagtctacagcccttttcactccccgggtgtgggacacccagtgaacctcccattttcagaaacttcaggcaagaagcaggtattaatctctatacaaggcactctcaaactttggagatatgcgtttagcaccccttttctctccccaagaatgagaggagactcagataatatacatccactctaggct

SEQ ID NO: 815 - DNA, 240 bp, synthetic construct
  misc_feature 1..240: note = Description of artificial sequence: synthetic polynucleotide sequence
  source 1..240: mol_type = other DNA
ctcggaaccttctccctgtctcttagtctccttcttacttgtctttgttcaaggccagtgggccagtttaatttctctcctcctcctctcttctctcctctcatttcctgcccccaaccctgcacttgaaagactcattgaaggaattaggcctgactttattttttttaccatattaacaaaacgatatttctttttgaaaaatttatttttattatttttaaagacagagtcttgctc

SEQ ID NO: 816 - DNA, 359 bp, synthetic construct
  misc_feature 1..359: note = Description of artificial sequence: synthetic polynucleotide sequence
  source 1..359: mol_type = other DNA
ccactcctggctttttaattatttttttaattgacacataaataattatatagatttatggagtagagtgtgctatttcgacacatgtctaagatgtattataattaaatcatagtaattagcatatccatcatctgaaacttttatttctttgtgttggaaacactcaaaatcctctcttctagctatttgaaaatatagaatacattgttgttaactgtagtcaccctacagtgctatagaggccttacttaaatttgacctttgtgagttcagtaacttttcctcaacaagaagccatctacccagttatttcttcactattcagtaacatggggcagaaaaaaatacttaatcag

SEQ ID NO: 817 - DNA, 361 bp, synthetic construct
  misc_feature 1..361: note = Description of artificial sequence: synthetic polynucleotide sequence
  source 1..361: mol_type = other DNA
tgccccacatcaatctgttacacttataataaatctctttttattttgaaaagttcttttctgtgaatgagccaaacctagacctctctccttctaagaacaaacaagtatttcagttgctccggccagaacttcaattcacacctttccttctcttactttgagaccaggcctttcttagcacatagagaccaggtgggactgcaagccaagtgtggactttgaggatgatgaccagtgactcacctccagcccctggctgaccatgacacaagggaggccaattttcgggctggcccccatgtggtctccctcctcctcctctcttcccccagctgctcatgacctgcctgccccaccc

SEQ ID NO: 818 - DNA, 241 bp, synthetic construct
  misc_feature 1..241: note = Description of artificial sequence: synthetic polynucleotide sequence
  source 1..241: mol_type = other DNA
gcttccttcacattccagataaactcacagcagatccctgcttcctgactttggaaacgttgctaaagcaggttctagataaactgctgcctcctcatttctcacaccttccttagctcttgctctttgcctgttttcccaaaattcaagtgcatttctttctcatcctcaagctgtatttttttcccttataaaaccaagcagagtgggaaatactggacttatttttttggacctgaaa

SEQ ID NO: 819 - DNA, 478 bp, synthetic construct
  misc_feature 1..478: note = Description of artificial sequence: synthetic polynucleotide sequence
  source 1..478: mol_type = other DNA
gcattaacattgatttagcacctgctgtatgacaagcactgttctaggtgatttacatgaatatttacatcatgtcatattacaatatattacattacatcgcatcacatcacatacattgtattgcatcatattatattacattgaactacatttgcattacactgcatttggaggaaaatatcttgggaggaaaggacagaaatggttgtagcatttcttacctactctgccctacattcacagggtgatcttggttaagctctgtaatctctctttgtattaactttcccttctataagataggaggggcctcatagattggctggtgacataattattaaactcattatattcttattatagtctaatagtttatgaccaaaattctaattttctatttccaagtgacaatgcaatgttgaagggggtgcctaattctacacacagacacacacacacaatttagctatgcctc

SEQ ID NO: 820 - DNA, 478 bp, synthetic construct
  misc_feature 1..478: note = Description of artificial sequence: synthetic polynucleotide sequence
  source 1..478: mol_type = other DNA
tcaggaatcttctattaaaaagagaacaaagctaaattaaataaattgccagccaggcatggtggctgacacccgtaatcccaacaatttgggaggctgaggtggatggatcacttgagctcaggagtacaagactgttaggttttgaagggaaggcgagacttaaagaaagacacacacacataagagggaagttcaacaacaaatgcagactttatatccagcataaaacctacagaagtcagagaccagtctaatgccagtacctgctgctgcttataggctggggcaatttataggtatgggcaggaggggtctgggcagtatggcttgctgcctggcaggaaattgataagatggtcccatgatgaggcagttctggtccttgttcaggcaggatgtcatcatggtgttccttggacctttgcccagaaggtctttgccttctagtttagcataaaaaggaagaggggcattg

SEQ ID NO: 821 - DNA, 478 bp, synthetic construct
  misc_feature 1..478: note = Description of artificial sequence: synthetic polynucleotide sequence
  source 1..478: mol_type = other DNA
ttaattatctggctgtttcctgctaaataggagcactgcactcaggctttgggttttcagcagtgggtgtccgactttagagttgttttcctggaagtgctgataccaaacttggcagagaagaatggtatcgtgtttctatatagctgcctggacaagggagttcggcctttgggagataaagcgggatatgaaggtgcgcacacatgggccaattgtcagtattatgagggagaaaattagggaccctaagacaggggttacccaaggtatccactttaggaaggatgacccctgccaacagtgaatgacttgatgttggatttctgcagccgtgtaatggagcctgtgggctgcgttgcgaacaatgccggcttcattaacataaaaacagcattcttcttggacatatacacatgtgccccaagacaagaatgttaatccaaactgcaccattttgtaagcgccctgctatttt

SEQ ID NO: 822 - DNA, 360 bp, synthetic construct
  misc_feature 1..360: note = Description of artificial sequence: synthetic polynucleotide sequence
  source 1..360: mol_type = other DNA
gcagaccttggtaaaagtgacacatttcatgggtttttgggccatgagaaacaccctgcctaaccacttgaccacaaggcccacaaaggcccaactaaagaaatatctctatcatatccttctgggcaaaggtccaaggaacaccacgatgacatcccgcctgaacaaggaccagaactgcctcatgacgggaacatcttatcaatatcctaccgggcagcaagccatactgcccagacccctcccgcccatacctataaattaccccagcctgtaagcagcggtaggcactggcgttaggctggtccccgacttctacagtgtgcatatttctttaaccctcgccttcccttcaaaacc

SEQ ID NO: 823 - DNA, 360 bp, synthetic construct
  misc_feature 1..360: note = Description of artificial sequence: synthetic polynucleotide sequence
  source 1..360: mol_type = other DNA
aaacacatacagccctttgttgatttctttaaatgttttcttcttgttatttttcagtaatctaactatactctccattattgcttttaaaaaattatttctgtctttacaaaagtaatttgtgctcatggcagactatttaaaaaacaaaatgaagccaaagaaagaaaataaaaattaactgcaggagaaggaggcaagagagctaactagatgcagccaggagaaacacctctcacagagatcttcccagattttcagagggaaggcatcaagagtggacagagggaagacacagaggctgggctgaagcaggaggaagctgaaaaccctgcatgaggctaccacacactgggactt

SEQ ID NO: 824 - DNA, 479 bp, synthetic construct
  misc_feature 1..479: note = Description of artificial sequence: synthetic polynucleotide sequence
  source 1..479: mol_type = other DNA
gttcctggcccccaacaactcctgcagaagggatgagttgaacaggcaaggagaaacatgctcttgcaatgggtctctggaatcacgacaggaagagacccctcaaccactgtggacacttgagttggcaaggagagctgcttagagaagtggtaggggcagagctccaggtgatgtggagcccagtaggtttcgtgcgggagtgtttgtggtggagtacagccagcgatgtccatctccctaggctcaacttgcttccataggagactttagcaccaggggagctgtcggtcctaaattctgcagggcggtgttgcccatgagatagggccagtctgacttcagcaccctttggtctgctagcctttcccagggccccagcctgtccatgcctgcttgcagtgcagccaccaggtacctcctgggagcccacatcatagcacctgtgctggcagaccatgccagactgtcagagtgct

SEQ ID NO: 825 - DNA, 479 bp, synthetic construct
  misc_feature 1..479: note = Description of artificial sequence: synthetic polynucleotide sequence
  source 1..479: mol_type = other DNA
gcagcagagtagcccccatggacacacaccagcccacccagctcatcccctaactacagcctcccccttgttgctttgcttgcacacacttgcccacagccacccttcatatcactttgccagtacctgcgtgtacaggcagacctcaccttcccttccccaccagcatacgtgtgagcgtgtgccctgccatgccactgctgctggtgtgagtatatcctgcccctcctttccctgcagcactgtccactgtgatggcaatggcattgtcatcagagtgttgttgggcatggagctgccagctccgccccagccagtccccagccctgcccctatgcgaacactgcctatggcacaaaactaggcacaaaaaccagcaggcccacccctgccctgagcggccaatgcctcccatgtgaatgtgcacagggggcacacacagccctgcatctagcagcatcctgctcccatgctaatcc

SEQ ID NO: 826 - DNA, 121 bp, synthetic construct
  misc_feature 1..121: note = Description of artificial sequence: synthetic polynucleotide sequence
  source 1..121: mol_type = other DNA
caacactggcacaaacatgtgtacagttgctggtgagggccccccaacctgcctgagccatgctgccactgctgcttctatgaacacctgcacgaaggctggcactccggcatccactagc

SEQ ID NO: 827 - DNA, 358 bp, synthetic construct
  misc_feature 1..358: note = Description of artificial sequence: synthetic polynucleotide sequence
  source 1..358: mol_type = other DNA
accttgctgcagccaacaagtgtgcaccccactgcaccgctgctgccactgcgactggcacatgcgactgaggatggatcatgtttccacagccctacaaagcactttggctggcaccatgcctcagagagttgtgatcagaggtccaggagcacctcaggcccctccaacatagcaggttcctaaccttaaggagccagagaacaagaccggggcctgataccagtgccccagagttataacacacagtttgggagtcctgagctgagacttgggcccctaaaatcttccagaaatgaagccagtctactgaacccaccttataccacaatcaaaccccgaaggtcattaaatatga

SEQ ID NO: 828 - DNA, 121 bp, synthetic construct
  misc_feature 1..121: note = Description of artificial sequence: synthetic polynucleotide sequence
  source 1..121: mol_type = other DNA
tataaaaagggggaaaaaaaaacaaaaacagcaacatcaaagattgaaggaacatcattctacaaagatgagaaagaaccaagataagaactctaacaactaaaaagccagatggtcttct

SEQ ID NO: 829 - DNA, 359 bp, synthetic construct
  misc_feature 1..359: note = Description of artificial sequence: synthetic polynucleotide sequence
  source 1..359: mol_type = other DNA
ttcctccaaacaatcacactagttctccaataatggttcttaaccaggctgagatagctgaaatgacagaagtagaattcagaatattgataagaacaaagatcatcgcaattcaggagaacactgaaacccaatttaaggaagctaagaatcacaataaaacaatacaggaggtgacagacaaaatagccagtatagaaaagaatgtaactaaactgatagagctgaaaaatatactacaagaatttcataatgcaattgcaagtattaatagcagaatagaacaagctgaggaaagaatctcagagcttgaagactgactttctgaattaagacagacaaggagacagtcagacaag

SEQ ID NO: 830 - DNA, 360 bp, synthetic construct
  misc_feature 1..360: note = Description of artificial sequence: synthetic polynucleotide sequence
  source 1..360: mol_type = other DNA
aacagagaaaaaagaataaaaaggaacaaacaaaacctttaagaaaaatgagattatgtaaacagaccaaatctatgacttattggtgtccttgaaagagatggggagaatgggagcaacctggaaaacatattccagcatatcattcatgagaacttcccaacctagctagagaggccaacattcaaattcaggaaatgcagagaacccccacaagatacttcacaagactgtccccaagacacataattatcagattctccaagatggaaatgaaagaaaaaaatgctaaaggcagctacatagaaaggaaaggccatctacaaagggaagcccatcagactaatagtagacctctca

SEQ ID NO: 831 - DNA, 241 bp, synthetic construct
  misc_feature 1..241: note = Description of artificial sequence: synthetic polynucleotide sequence
  source 1..241: mol_type = other DNA
gatatttttcagacaactcaacgctgaggtaatacattaccaccaggcctgcctaacaagagttcctgaaagaagcactaaatataataaggaaagacagttaccagcctctacaaaaatgcagttaagtatatagaccagtgacagtataaagaaaccacacaaacaatgcacagaatggcaagctggataaagaagcaagacccaatggcatactgtcttcaagggactcatatcacat

SEQ ID NO: 832 - DNA, 481 bp, synthetic construct
  misc_feature 1..481: note = Description of artificial sequence: synthetic polynucleotide sequence
  source 1..481: mol_type = other DNA
tagagaccttcaaagagactcagactcccatacaacaatagggggagacttcaacaccccactgacaatattagacagatcatcaagtcagaaaattaaaaaagatattcaggacctgaacttaacactggaccaaatggacctcatagacgtctacagaactctccacccaaaaacaacagaatatacattcttctcactgcctgccacatggcacatactcccaaatcaacgacaccatcagacataaaacaatcatcagcaaatgcaaaagaccaaaatcataccaaccactctgtagaaccacagtgaaataaaaatagaaatcaagactaaaaaaaaaattgctcagaaccattcaattacatggaaattaaacaatctgctcctgcatgacatttgggtaaataatgaaataaaggcagaaatcattaagtttttttaaaccaatgaaaacaaagacacaacataccagaatctc

SEQ ID NO: 833 - DNA, 479 bp, synthetic construct
  misc_feature 1..479: note = Description of artificial sequence: synthetic polynucleotide sequence
  source 1..479: mol_type = other DNA
agagcaaaccaaccccaaagctagcagaagacgagaaataaccaaaatcagagctgaaatgcaggagaatgagacatgaaaaaccattcacaagatcaatgaatccaggagctggttttctgaaaaaataaataagatagatagactgctagctagactaataaagaagaaaagagagaaaatccaaataaacacaatcagaaacaacaaagggaatattaccactcaccccgtagaaatacaaataaccatcggagactactatgaacacctctatgcacacaaactagaaaatctagaagaaatttataaatgcttggacacatacacccccaagactaaaccaggaagaaactgaatccctgcacagatgaataatgagctccattactgaatcagtaataaatagcctaccaacccccacccccaaaaaaatgcccaggacctgatggattcacagtcaaattctaccagatgta

SEQ ID NO: 834 - DNA, 479 bp, synthetic construct
  misc_feature 1..479: note = Description of artificial sequence: synthetic polynucleotide sequence
  source 1..479: mol_type = other DNA
caaagaagagctgacaccattcctagataaattattccaaaaaaattgaggagaaggggctcctccccaggtcattctatgaggccagcataatcctgatactaaaacctggaagagacacaataacatcaacaaaaaacttcaggccaatatccttgatggacattgatgcaagaatccttaacaaaatactaacacactgaatgcagcagcacatcaaaaagcaaatccaccatgatctagtaggctttatacccaggaggcaaggttggttcaacatactcaaatcaataaatgtgattaattacatagacaggactaaagacaaaaaccacatgattatctcaatagatgtagaaaggttttttataaaattcaacatttctttatgttaaaaatgctcaacaaactaggtattgaaagaacatgcctcaaaataagagccaactatgacgaactcacagccaacatcatactga

SEQ ID NO: 835 - DNA, 121 bp, synthetic construct
  misc_feature 1..121: note = Description of artificial sequence: synthetic polynucleotide sequence
  source 1..121: mol_type = other DNA
caacttcagcaaagtttcaggatacaaaataaatgtacaaaaatcactagcattcctatacaccagcaacagcgaagccgagagccaaatcaggaacacaattgcacttgcaatttccaca

SEQ ID NO: 836 - DNA, 121 bp, synthetic construct
  misc_feature 1..121: note = Description of artificial sequence: synthetic polynucleotide sequence
  source 1..121: mol_type = other DNA
ccatgctcatggataggaagaatcaatatcattaaaacgaccaaagcggtttatagattcaatgctgtttccaccaaactaccagtgatattcttcactgaactagaaaaaaatattttaa

SEQ ID NO: 837 - DNA, 240 bp, synthetic construct
  misc_feature 1..240: note = Description of artificial sequence: synthetic polynucleotide sequence
  source 1..240: mol_type = other DNA
ggagaaaggacttcctactcaataaatggggctgggataactggctagccatatacagaagatggaaactagactccttccttacaccagatacagaaatcaacttaagatggattaacaacttaaatgtaaaacctaaaactataaaaaaccctggaagacaatataggcaataccattctggacatagaagtgagtgaagatttcatgacaaagacaccaaaagcaattgcaacaaaa

SEQ ID NO: 838 - DNA, 121 bp, synthetic construct
  misc_feature 1..121: note = Description of artificial sequence: synthetic polynucleotide sequence
  source 1..121: mol_type = other DNA
tacacatggccaacaagcatataaaaaagctcaatattacttatcattaaagaaatgcaaatccaaatcacaatgagagatcctctcacaccagtcagaatggctattattaaaaagttaa

SEQ ID NO: 839 - DNA, 479 bp, synthetic construct
  misc_feature 1..479: note = Description of artificial sequence: synthetic polynucleotide sequence
  source 1..479: mol_type = other DNA
catatacaccaaggaatactatagagccgtaaaaaagagcatgtcctttgcgggaacatggatggagctggaagtcattatgcttagcaaattaatgcaggaacagaaaaccaaataccacatgtgttcacatataagtgggagctaagtgataagaacacatggacacaaagaggggaacaacacaaactggagcctagctgagggtggaggccccagggaggagggagatgagcaaaaaaaaaaaaaaaaaaaaaaaaaaaaaaaaaaaaaatgactgggttctaggcttagtatctaggggacaaaataatctgtatgacaaacctccatgacacgagtttacctatgtaaaataaaagtttaacaaaaaactaaaaaagttacctatgtaaaacaaaagtttaacaaaaaactaaaaaaagttacctccacccagaaatgcctttattaacactttggtttgtaaccctccatta

SEQ ID NO: 840 - DNA, 478 bp, synthetic construct
  misc_feature 1..478: note = Description of artificial sequence: synthetic polynucleotide sequence
  source 1..478: mol_type = other DNA
ttttctctagacatatagatttatgaggcaggctaatgtgctgagacactagcttgagtttcatttggccttgctgtgaatatacctgggccttcctttgcttcaggatgccctaaactgtggcaaagcagagctgaactgcccaaaggaaagtgtgaagaggagaggcaggccaagcctggagaaaggctacccaagagagaggaaaggaaactgtggtgagtgcacctcactcctaaagaaggacaggaactctggtaggtgaggtgtgttttccatagatactaaaactcaaagccacacaggggacatatgtccattcctcagccagtcactgtggccaggaacagagggtcaggtaagagaatggcaactcctaaggaaaccacatgcctggagccgtgggtgtagaagcagatccccagaggaagcacgggtcccacagacacagtcccaactcttgccgtctaggcagcca

SEQ ID NO: 841 - DNA, 240 bp, synthetic construct
  misc_feature 1..240: note = Description of artificial sequence: synthetic polynucleotide sequence
  source 1..240: mol_type = other DNA
ctcccatctgtaggtactacacagcttcgtagtacttcttaaagtacttcttgttcaagcgatgggacgaaaagaggatgcaggacaaggaggaggaaaggagatccttgcttttgtagaagaaacaaggaggcagggaaggcttagaggacaggcaaggagagatgttttcttaaaaacatcctctgtctgagtgttcagccccacatctctgctggtcctacccctataagcacaagg

SEQ ID NO: 842 - DNA, 240 bp, synthetic construct
  misc_feature 1..240: note = Description of artificial sequence: synthetic polynucleotide sequence
  source 1..240: mol_type = other DNA
aaaagggcgggaggcagcaggagaaggattgatcattcaggcctatattcaagtttgccttttcttgccatgtggttttaatctcaccaatcacaagcctgaaggtatagtggggccactgaggtccgagttcaaattcagccatgcaactaaggaaacattgtttgatcttggtcctgttttctcatgtgtaaaatgggtctaactctaaaccacacattgcactgagaatgaaatgag

SEQ ID NO: 843 - DNA, 240 bp, synthetic construct
  misc_feature 1..240: note = Description of artificial sequence: synthetic polynucleotide sequence
  source 1..240: mol_type = other DNA
gcactatgaaatgaagtgaggttagttgaataatgttccccccaaattcatgtctactgaggacctcagaatgtgactatatttggaagtagggtctacgcagatgtagtctaaatgaggtcatactgcattagggtgggcactaatcaaacggatggtatcctcataagaggagaggaatgtagagatacacacagaaaagaatgtcatttgaagatggaggcagagattggagtgata

SEQ ID NO: 844 - DNA, 240 bp, synthetic construct
  misc_feature 1..240: note = Description of artificial sequence: synthetic polynucleotide sequence
  source 1..240: mol_type = other DNA
caactataagtcagggaatgccaaggacttgaggtcatgtgttacagaagccctaggaaatgagtcaatttcctggcacagcactaagacatgctggtattcttcattccatccctttcccctattcctaaatgtgctccagggacaatggggaagctggagcacatataagaataggggaaagagagggaataaaagggtattaaaaactctcaaggtatgttaaaaaaaagactctca

SEQ ID NO: 845 - DNA, 239 bp, synthetic construct
  misc_feature 1..239: note = Description of artificial sequence: synthetic polynucleotide sequence
  source 1..239: mol_type = other DNA
cccatgtttgcagatgacataattttatatctagaaaatcccacagtctcagcccaaaagctccttaagctgataaacttcagaaagtttcaggatcccacatgaacatacaaaaatcactagtattcctaaacaccaaccatagctaagccaagagccaaatcaggaatgcaatcccattcacagacaaactgctaaaagcaaaaccaaaactttccaaataagccaggctttcgtca

SEQ ID NO: 846 - DNA, 240 bp, synthetic construct
  misc_feature 1..240: note = Description of artificial sequence: synthetic polynucleotide sequence
  source 1..240: mol_type = other DNA
gttcctcagaactagttctggtttgactcactctcatgttacggcaaaccttaagctgaatgaacaacttttcttctcttgaatatatcttaacgccaaattttgagtgcttttttgttacccatcctcatatgtcccagctagaaagaatcctgggttggagctactgcatgttgattgttttgtttttccttttggctgttcattttggtggctactataaggaaatctaacacaaac

SEQ ID NO: 847 - DNA, 240 bp, synthetic construct
  misc_feature 1..240: note = Description of artificial sequence: synthetic polynucleotide sequence
  source 1..240: mol_type = other DNA
agcaactgttttttgttgtttacttttgcatctttacttgtggagctgtggcaagtcctcatgtgagtaacgagtgggttgagatactctcatactattatgttgtggaccatgatgaggctgccagggtgggggaagggtggcctaccttctctccacaccatttgaggcaagagacattctgcctcagaaattgtgctgaggggcacaaataagctaatgtcctcctgccccagattt

SEQ ID NO: 848 - DNA, 480 bp, synthetic construct
  misc_feature 1..480: note = Description of artificial sequence: synthetic polynucleotide sequence
  source 1..480: mol_type = other DNA
ctctcacttgttcctatgcatattgttcttgttgctcagttttataaggtgagatattttctgcaccaaatatgtgcactgtaaaataatataactattcttaagattgtctctcagcttagagttttcggaggcttaatggtgaagaacttaaaaatctgttttcctatgactgacatctgtttgtgattatccatttagcagacggtgatccctccaggctggcctttgtttacaagctatgcctaagaggcagctgttggtggagggggaacaaaaacaaaaaacccaaaactattatcttaataacttatagaggtaatcattattgaacaaaagcatgatttggggactatggaaaggcttattctttccatataaaatgatcagcgaaaaggtagaaaaattaaacagaactgaaataattgctattgattgctcaccgcctggatgcactgagtagaagagcaaaggcaatgg

SEQ ID NO: 849 - DNA, 480 bp, synthetic construct
  misc_feature 1..480: note = Description of artificial sequence: synthetic polynucleotide sequence
  source 1..480: mol_type = other DNA
gttcatgtggaggggatggaggtggagaggctaagcctgagtgagattaccaactaatcaggacttttaacccaaaaatactatggctctgaggggcagggaatgagagacctaaattgacaaaatgcagagtaaaaatattcagtgtgagcagtaatgagacagttgtatcagggtcaaatacggagttggcctggatgtcctccaagctcctttccaagcctaagattctgtgagtggatgaacaatcctggtcctgctgctcttgccactggaacctgatctatttgccttcattatttgaggtctccccatcatcaggctctttgttgtctgctgcttcagggtgtcttctccccagatttctcctgttggtgagcttttccattgaactggagctcctcacaggcaagaagcacacctttaaggttctctgagtcccaagttcctagtgcagtacctggcaatacacataggtgc

SEQ ID NO: 850 - DNA, 479 bp, synthetic construct
  misc_feature 1..479: note = Description of artificial sequence: synthetic polynucleotide sequence
  source 1..479: mol_type = other DNA
ttagtgggtgcttgccgaattgttgaatggatttatttgatgaaatgtcaggagaatcaccagaaatgaaatgttcgtgtaatggacagggggaagtttgaggttgatttgaaaaaggagatggtagagacagtattatgggtcatgcttcagagtttatttgctttacaatacattggacagcaaccagtagattgttgtgtgtcattttaattccacatgctaatgtccaaatatgtcatatgtcttaattgttgcatacgtgggttactctgtaaaggggcaactgtagtatcacctcctcatgccacaccctgctccactgtagctgggctcgataaccttcaaatcaactcacagaattccaggacagacaagagcatctgaaaggttatctagccccagtcacctctgatgccttccagctgtctctaacacacctgtgggctgacttccagttcttagtcttcacggctccc

SEQ ID NO: 851 - DNA, 240 bp, synthetic construct
  misc_feature 1..240: note = Description of artificial sequence: synthetic polynucleotide sequence
  source 1..240: mol_type = other DNA
tatgatgaactgcccctgctttgagggattttcctccattgcctcagaagtactgccctgggggagcttctgatgctcttctgaccaccttgtctctgcctttttcactagtcctctgttcctgctctccaaattttgggacgttcctgagttcagatcttttctttataatctttcttttatattctccccatcagatggttcattcattcctcaatattaactaacatttccatatta

SEQ ID NO: 852 - DNA, 239 bp, synthetic construct
  misc_feature 1..239: note = Description of artificial sequence: synthetic polynucleotide sequence
  source 1..239: mol_type = other DNA
gaaataacttccttatctttagccctaaattttgtcccaaactctggacctacaattttttggaatgcttatgccttgcccagactaaaaccaaacttactgtcttccctctaaaatcagctccccatcttctatttctccctgccacccttcctcccccatggctccaatattgtcttgccagtctggtcttaaaaccacagtcaatcttgttgcttttctctttgtctcttgtgcat

SEQ ID NO: 853 - DNA, 480 bp, synthetic construct
  misc_feature 1..480: note = Description of artificial sequence: synthetic polynucleotide sequence
  source 1..480: mol_type = other DNA
ggctgatcagcagtcaattgttttgtcaattgtcttatatgtttcttcttcctcttccttgcttcctttttctgacctgaagttagggccttgttaccaaacatctagatgaatacagtgaccccctaattgagaggctgtctaccaattccacccaccctcaattctatactcaaaaaaaaaattagatgtaatctttttcagatactcctttggtattgtcacttagtttttgagtgactgccactatttcccgattggcagctctgcctggcattaagctcttgacattctcaacctaagtgtccagccaagttactctgttcattgtcccctcaacacgcctgtgcatttgcacctctgagactgcttctgagtcagctatgcactgccctttagaatagcttcaaccccaaatcctaccagtgcttcaaaggcccagttcaaatcctacccctctgggaagtctcccttccttta

SEQ ID NO: 854 - DNA, 240 bp, synthetic construct
  misc_feature 1..240: note = Description of artificial sequence: synthetic polynucleotide sequence
  source 1..240: mol_type = other DNA
gtcaacttctagggcttttgcaattttatcacttgttttacatcagttttactatttttcatgtgtgagagttttaaccttccaattatggtacaatgtctttaagggcaagggccctttcttagaggaaaccctctatgaattctccaatgataaattattctatgaattctcacaactttctaatataaaggcttataaaaagtgggaactcactgtttattgcttaaaaaattgaga

SEQ ID NO: 855 - DNA, 239 bp, synthetic construct
  misc_feature 1..239: note = Description of artificial sequence: synthetic polynucleotide sequence
  source 1..239: mol_type = other DNA
tttaatttgaacttaaatgctctattaaattgagtagaatagcatcttaaggctactggtagtctatctatgccacagatggtttagagatcaaataattactcatatacctatgacagcagagtactggctgtaagatccccccaaaactcaaatacctattgggtttgtcaggcaacaaaaataagtgaatccagctaggtctaatacaatggaaaatggtaggacctggggcaaac

SEQ ID NO: 856 - DNA, 240 bp, synthetic construct
  misc_feature 1..240: note = Description of artificial sequence: synthetic polynucleotide sequence
  source 1..240: mol_type = other DNA
tctgcataacttgcccaaaggcattcaaattcagattatgttcagacattgctaattacaattagtgtcttagacacttggcttcaaaacagtggttagttcaggtatttcagatcaattgggtatgcatttatctaggtcttcatggatagccgggctctactagacactgggagagggaagaggcaaatgggataagactggcagtatttaacaaagaatgaagtattttacaaacat

SEQ ID NO: 857 - DNA, 239 bp, synthetic construct
  misc_feature 1..239: note = Description of artificial sequence: synthetic polynucleotide sequence
  source 1..239: mol_type = other DNA
gatcctttaggctggttattgttacacaaaggaatgatttgctaggattcttgagatacttccatagaatgtctatgcctcacttattgcacagaccagagaattccataaaagcactggctgtgtcttatttacccttgtatactagagcttggcacatagtaaataccaagtaaatgttttgaataaaagaaagagataattaaagcttcagcaccacaattatttgtatttcatct

SEQ ID NO: 858 - DNA, 481 bp, synthetic construct
  misc_feature 1..481: note = Description of artificial sequence: synthetic polynucleotide sequence
  source 1..481: mol_type = other DNA
atcagtttggaaatagatctccacagacagtagaaatggcaagaaactaggcctatagcaaccaagaagtgaaactgctagaacctaccatcatttctgatcctcttgcaaattttgcttgaaaaaaatttcctcattttctgtttacgaacttatcctcagaatttacagatgtttccttgatttctctggaaagatacaacttcctaatgcaattgagtaaattgatacttcttatgtagaaataagcagaataagctgggcaaggtagcccacaactatagtcccagctacttgggaggctggggcaggaggatcacttgaagccagagtttgcttgaggccaggaattcgaggctgcagtgctctatgatcacacctgtgaatagccactacactccaggctaggcaatgagtgagacctagtctctaaagaaaaaaaaaaaaaaaaaaaaaagacaaaataagatcaaaattgagt

SEQ ID NO: 859 - DNA, 479 bp, synthetic construct
  misc_feature 1..479: note = Description of artificial sequence: synthetic polynucleotide sequence
  source 1..479: mol_type = other DNA
atgaactgataaatacaaggtagacaagaaatatcctgagaggcgcaatcgttctgcagacatttgcttgggaagctcaggggaggatttatgaaggaggtagccctgagtgagtcttaaaaaatgggtagacttttaccaggcaagatcttagtgaagttagtgagaggagtggtcatataggaattcatgggatttttagaccaaagattaccaccctcataagtgataatgacgatgaatgtgaagaatgtttaccacttgcaaagtatttttcacataccttgtccaagttcccacaagcatttctgttcactacctgtggtttggtcaagagacccagatattagagaacgtgttgatttctagtttctaactccgcccaataacattaagatgaaaatggatagccacataggaacagacatcaataaacatatttagaaaacacaagtgaattttaaaaggggagacttaag

SEQ ID NO: 860 - DNA, 360 bp, synthetic construct
  misc_feature 1..360: note = Description of artificial sequence: synthetic polynucleotide sequence
  source 1..360: mol_type = other DNA
aggtggcatggttgtttgaacatgttcgtttttgtctcctggagaaaagtcagcacaatgctcattcagctacataagtgtttctgttacagctctttcagtccaccattcggcaggtcctgaattcttgtcccttgtccagaaaaaatgaggtatgtggacaactggagggtgagcaaggcggagaggagcttcgttgagtgacagaacagctttcaggagacccaaagtgggtagcacttttccataggcaggaaatgagtgttcaactctcagcagagaggagacccacaatggatagctccttaccacaggcaggtcatcccagagaggtgaggagacacaagccaggcacagtgg

SEQ ID NO: 861 - DNA, 121 bp, synthetic construct
  misc_feature 1..121: note = Description of artificial sequence: synthetic polynucleotide sequence
  source 1..121: mol_type = other DNA
ctgggtgagagagcaagactccatctcaaaaaaaaaaaaaaaaaaaaaaaaaaagaaaagaaagaaagaaagaggagatctgaagtgagcaactgcttcccctagctggtagtcccaatgt

SEQ ID NO: 862 - DNA, 239 bp, synthetic construct
  misc_feature 1..239: note = Description of artificial sequence: synthetic polynucleotide sequence
  source 1..239: mol_type = other DNA
ttggccaggctggtctcaaactcctgacctcgtgattttcctgcctcggcctcccaagtgctgggattacaggcatgagccactgagcccggtcgagtccagggtttttacaggctcagaagggaggaagagtgtgctgattggcccatgggcagccatggaagggcccagaaaaagcactgtaagttcttaccccaggctgtggactccacccacaattggcaacctggctcccaggc

SEQ ID NO: 863 - DNA, 240 bp, synthetic construct
  misc_feature 1..240: note = Description of artificial sequence: synthetic polynucleotide sequence
  source 1..240: mol_type = other DNA
tttgggccatccctggcttgaaggttgggtttcaccagggacctaacccctttccgccaaggaacctgtctccctcttgccatcaacatgctgtccatgatgcccaggctgttcgtgccgaggggtgcctgcaggcctgccctgagccaccctcagcccctgctcagcctccctctgtgcttgtcagcacccaacatctggaagaggtcgaggcagcagggggctagtgtgtcagtacca

SEQ ID NO: 864 - DNA, 241 bp, synthetic construct
  misc_feature 1..241: note = Description of artificial sequence: synthetic polynucleotide sequence
  source 1..241: mol_type = other DNA
tcctgagcacccacatgcctggccgggttgtgacagcacctaggcttggccacaactttgcttcacccagtagcaggtgccaggagtgggaagaggccagggagtgggagcaggcactttcaaccttgtgggagcaggggacttcctgggcccctgagagtacagagatgcctgggtccagagccactgctgggcagctacaggggtgcctgggagcatgcggttcccaccccgccaactc

SEQ ID NO: 865 - DNA, 481 bp, synthetic construct
  misc_feature 1..481: note = Description of artificial sequence: synthetic polynucleotide sequence
  source 1..481: mol_type = other DNA
agtacggggcgggactcccacctgttcttggcctccctggccacacctccactgctgcagctgctctaaacgggcagctgctgccatcactgtgagctatgattgtgccactgactccagcctgggcaacagaaagagacctatatggtatgttaaatggtaatgactgctttgggggagaaaagatgactaaggattgttgggaatgctggggtagggttggagtgctcttgcaattttacataagacagtctcaggagaaaaaacaatgaaagtgtccgggtagagggacatgtacactggcagcaaggtcttcccttagggattggatctgcggaagaggccacacaggcctggaagcaggcttaaggccattcaggctaggaattccagtgtttcaaagacagactgcaatggatggcggttggtaggtcaaaagctccagataacatctctcagccctgcgaacaccttactctcg

SEQ ID NO: 866 - DNA, 480 bp, synthetic construct
  misc_feature 1..480: note = Description of artificial sequence: synthetic polynucleotide sequence
  source 1..480: mol_type = other DNA
gggagaaggatgggcacagtgggtcctttaaagcatggggtccaggacaggggcctcttgtcttggctgttgaaaaaactgggttttacactgagtgaaatgctgagccatcggaaggttttaagaaaatatggtttgacttttattttttaaaaaccactctggctgcagaatcaactgcaggaaggcaaaactggaatcatagcatccagttgtcagactaatgcagaaatcaccatgagaaatgacaatgactctgaccgatatggaagcagtggaggtggtgagaaatggtcagattctggatatatttgaaggaagggccaatagggttggttaatgaatcagatgtagagtgagaaaagaaaggactcaagatgactccaaggttcttgtccttcacctcaataagtggaggatggagcagaggaaggcaagactagaaggtaaaaatagcagtgagaaggctctgctatggta

SEQ ID NO: 867 - DNA, 240 bp, synthetic construct
  misc_feature 1..240: note = Description of artificial sequence: synthetic polynucleotide sequence
  source 1..240: mol_type = other DNA
taagaagaaatgataagaagctgaattaaggtgatggcagtggggtggaagaaaggagagccaccatgcaaaaagtatccaggagggagaattaacaggactaggggatgggccatatttgcaagatgagaaatgcagaggtctaagattctagcttaaggtgggtgttgctactattagcataataggaaaacaaggcacaaagacttttcaaaatttgtccaaggtgttagaggctta

SEQ ID NO: 868 - DNA, 240 bp, synthetic construct
  misc_feature 1..240: note = Description of artificial sequence: synthetic polynucleotide sequence
  source 1..240: mol_type = other DNA
caatttgtaaaaccaggattaaacccagatgtgtctgattttagagcctgagctcttactcattgcataaaccatattttccccagaggaggattagtaggaaaggaagctgctggttggaaagtatctttatagcagtgtctgttcctcggtttgctcaaggggacagtgtgccaggaaagtccccgtggaagggcaaggaagaaggggaagttaaagccagtggcaggtgatccaaga

SEQ ID NO: 869 - DNA, 240 bp, synthetic construct
  misc_feature 1..240: note = Description of artificial sequence: synthetic polynucleotide sequence
  source 1..240: mol_type = other DNA
atcttttctgttgctagagctatgttacatgctgtcctttcatgctctaaaaataagagtgctggcaagtgccaggcctgttggtgcagcttaagatgatacctttcttggatatatatgcatctgaataaggaaggctatcttctggtcaagctaaggtatgccatgagcatttccctgtggaaagcacttaattctgttcccagttgttacctgctgtaagatctccctttctaaaat

SEQ ID NO: 870 - DNA, 239 bp, synthetic construct
  misc_feature 1..239: note = Description of artificial sequence: synthetic polynucleotide sequence
  source 1..239: mol_type = other DNA
aaaaacaagaatacagctcactgaggaccttacatttccctctagctactgactcatttctcttctcctttttatagcactcttcttgagagagttgcctatatttgttgccacatctttacccattctcttttgaacctattcaagctttcatctgtacaaaactcactgatactgtgcttgtcaggatcatccatgacctccatactgctaaatgcaactctcaagagtatttggct

SEQ ID NO: 871 - DNA, 479 bp, synthetic construct
  misc_feature 1..479: note = Description of artificial sequence: synthetic polynucleotide sequence
  source 1..479: mol_type = other DNA
ctactgatcactcctttgtagcactgtgttttaaaatataggttttattattatttaggtatggtgaggccaatatatcaggaaatgactgtcgttgaaaaaagtatgttgtactcacagatcccaagagaaggggggcacaccatgccacaaagggccacatggggaagcaccagggtcagccaggaggtgggtggggggtgcgcaagatctttattgtggtttcaacaggaagaaatgggtgaagcagggtgagtggatttaggattagctgatataaataatttcagcaggctctggggcataggggctgtccctagtcttctggtacttggccctggggtgattaaggcagttgcatagtgttgggaatgtgaaagcccccaataaatgaggcagttgtgggtatgggctctgaaatgggttggtttgcatttgaaaggtgtgctcatgggcaagtggtttactctctcttagag

SEQ ID NO: 872 - DNA, 479 bp, synthetic construct
  misc_feature 1..479: note = Description of artificial sequence: synthetic polynucleotide sequence
  source 1..479: mol_type = other DNA
gttagaattggctaaccctgggagcggcagtcccttcagggtcagcaaggccccaggtgtcaaagcatcagaatacagaaaataaaatgcatggataatacacactgccatttgcctttgtacccttcctttcaatcttctctgctggtgaccgctcttcacaaagatctataaatgttggaataccccatgtctcagtccttgggcactctctttcctatctctctgtaggtgatgtaatgcagatatccatgactttaaatctttaacacttctgcattgatgactcctaaatttacatctctaccccaactgcctactaaacacctccacttggctatctaataggcatttcaaaccaaatctacaacaaacgtaactctttttccccttccttaatttgcttctcccccagccttctccattttaataaacagcatctccattgccttagtgactcaagccccaaacttaggaat

SEQ ID NO: 873 - DNA, 480 bp, synthetic construct
  misc_feature 1..480: note = Description of artificial sequence: synthetic polynucleotide sequence
  source 1..480: mol_type = other DNA
tttcccagatttccctctttttctcaaactatatatctagcctgtcagcagttcccttcaggtcttttttcaaactatagaaggcctaaacaaaggaaagacatgctgtattcatgaattggaagactaaatattattcagctggctgtattccccaaattgatctatggattcaatgcaatccctaccaaaattccagcttcctttgtctgcagaaatgagcaagttgaccctaaaattcatttgaaaatgtaaggaagcccgaatagccccctaaaaaaaaatcttgaaaaagactaacaaagttggaggactcacactttccagtttcaaaacttactacaaagctacagtaatcaacgctgtgtggtactgacataggatagacatatagttcaataaaacagaatcgagagtccagaaatacatccttatatatatgatcaattgatgttttgcaagggtgccaagacagttcaa

SEQ ID NO: 874 - DNA, 480 bp, synthetic construct
  misc_feature 1..480: note = Description of artificial sequence: synthetic polynucleotide sequence
  source 1..480: mol_type = other DNA
tagggaaagaataatttcctcaacaaattgtacaggcacaactgaatgcccacaatcagtagaacaaatttggaactaaagttcttatatttaggttcttgatccattttgtttaatttttgtatatggtatgaggtaaggctccaaatttgttcttttgcatgtggacatccagttgtccctgtacaattgctccatttatatttatcttagcagaaaatacagatgtaaatctttgtgaccttgactaggcaatggtttcttaggtattacacctaaagcacaaacaataaaagaaaaaagtagataaattggatttttttacttaaaatcaatttgtgtttcaaaattaaataaaatcaaaattaaattaaaacatttatccttcacaggattctataaagaaactgaaaagacaatgtgcagaatgggaaaaaatatttccaaatcatatatttgataaatagtttggcaattcct

SEQ ID NO: 875 - DNA, 479 bp, synthetic construct
  misc_feature 1..479: note = Description of artificial sequence: synthetic polynucleotide sequence
  source 1..479: mol_type = other DNA
caaaaagttaaatatagagttaccatttaattcagcaattctactcctacatatgtacccaagataattaaaagtatacatagacaaagacttgtatatgagttttcataggaactttattcataatagccaacaagcagaaacaatccaaatgaccatcaactgatgaatgggtaagcaaaatgtggtatatcatacaatggaatattatttagtcacaaaaaggaacgcagtgctgatatatgctacaatacagatgaaccttgacaacattatgttcggtgaaaaaagccagccacaaaagtccacatattgcttgattccatttttatgaaatatccagaataagcaattgatagagacagaaactagattagtggttgccaagggccatagggaaagggaaggggaaataggaagtttctgctaatgggtaaggggttccttttcagggtaatgaaaatgttctaaaattggat

SEQ ID NO: 876 - DNA, 240 bp, synthetic construct
  misc_feature 1..240: note = Description of artificial sequence: synthetic polynucleotide sequence
  source 1..240: mol_type = other DNA
aatagtgtttgttgcacaactccgtgaacatactaaaaaccacagagtcgtgcacttaaaaaaagtttgtgttttaaatatatatacacacttagacacatataaccctctttcgtatatcaattatactttaataaagctgttgaaatttttaaaataaaattttaaaacaaagaaaaaatatataaactcgccaacagaccacttctcacccctactagcccctctactctaagctat

SEQ ID NO: 877 - DNA, 240 bp, synthetic construct
  misc_feature 1..240: note = Description of artificial sequence: synthetic polynucleotide sequence
  source 1..240: mol_type = other DNA
cagcatttctgcaaacacattcctaaccgatctcactgcttgtaatcttgccagcaacctctccctctcagcaatagtctattgcctacaccaaagcttagttgtctcttaatgatgtaaatgaggttctatcattctcctgacccaaaccctccactgcttttcatcacactcagagcagctctgctgttgcctgatttagatgtatggctccaacagatttcccctgaagaaatgatt

SEQ ID NO: 878 - DNA, 240 bp, synthetic construct
  misc_feature 1..240: note = Description of artificial sequence: synthetic polynucleotide sequence
  source 1..240: mol_type = other DNA
ccatggctgataaaagttggaaagcctcctcagtttcagaccattatcagattagctgtgtgctctgtccctttcctcaaccataagaagtccatggataaagaaagcttcagagtaaaggagaaagcatgggaggtacagcaggaccaaggtggggcattcgcagcccccaccctcatcagagccagttccctactctccctgtctaaacctcttagtaagaggtagttcaagagaggg

SEQ ID NO: 879 - DNA, 240 bp, synthetic construct
  misc_feature 1..240: note = Description of artificial sequence: synthetic polynucleotide sequence
  source 1..240: mol_type = other DNA
gcaaactcaattccagcactcaaaagcacttgactactttgctcagtcaactagcaagtatttattgagaatgtagctctgttctatggagtcttattttcaagtgtcagactcccagacatccagtccaggtaaagaagatggtgtccattattcatttgacaaacaaagttggggttcaagggccagctattgaaaaaagctatggaaagcttcatgagacgtgcaggtaactgccaa

SEQ ID NO: 880 - DNA, 382 bp, synthetic construct
  misc_feature 1..382: note = Description of artificial sequence: synthetic polynucleotide sequence
  source 1..382: mol_type = other DNA
tatgtgtggttcacaaggactggttcatattcagaaacggccattagaaaaggaagaagaacttctcatttggatttataaagagtgtcttgtttactcttaatttatatcttctcttctccaggaaatcaacctataacttctcctcccagctccactctaccatggtctgtcaccttccccaaatgatttgttattcccctgttttcaaaagtgaacaaagaaccaaagacccagcaaagtttcacaaggccctgagactttcaattgtctatttcagatcaaatacagaacatgatcttcctcctgctaatgttgagcctggaattgcagcttcaccagatagcaggtaagaaaggacaaagggagaggcttaagaaag

SEQ ID NO: 881 - DNA, 307 bp, synthetic construct
  misc_feature 1..307: note = Description of artificial sequence: synthetic polynucleotide sequence
  source 1..307: mol_type = other DNA
gctttattcacagtgacagtccctaaggaactgtacataatagagcatggcagcaatgtgaccctggaatgcaactttgacactggaagtcatgtgaaccttggagcaataacagccagtttgcaaaaggtggaaaatgatacatccccacaccgtgaaagagccactttgctggaggagcagctgcccctagggaaggcctcgttccacatacctcaagtccaagtgagggacgaaggacagtaccaatgcataatcatctatggggtcgcctgggactacaagtacctgactctgaaagtcaaag

SEQ ID NO: 882 - DNA, 271 bp, synthetic construct
  misc_feature 1..271: note = Description of artificial sequence: synthetic polynucleotide sequence
  source 1..271: mol_type = other DNA
gcttcctacaggaaaataaacactcacatcctaaaggttccagaaacagatgaggtagagctcacctgccaggctacaggttatcctctggcagaagtatcctggccaaacgtcagcgttcctgccaacaccagccactccaggacccctgaaggcctctaccaggtcaccagtgttctgcgcctaaagccaccccctggcagaaacttcagctgtgtgttctggaatactcacgtgagggaacttactttggccagcattgaccttcaaa

SEQ ID NO: 883 - DNA, 136 bp, synthetic construct
  misc_feature 1..136: note = Description of artificial sequence: synthetic polynucleotide sequence
  source 1..136: mol_type = other DNA
ggtcagatggaacccaggacccatccaacttggctgcttcacattttcatccccttctgcatcattgctttcattttcatagccacagtgatagccctaagaaaacaactctgtcaaaagctgtattcttcaaaag

SEQ ID NO: 884 - DNA, 264 bp, synthetic construct
  misc_feature 1..264: note = Description of artificial sequence: synthetic polynucleotide sequence
  source 1..264: mol_type = other DNA
taatcttattccatttctggaatttttccttttcagacacaacaaaaagacctgtcaccacaacaaagagggaagtgaacagtgctgtgagtaagcatgatttttacttttctttcttactttcttttctctctcagcttgaattttaaagtaaccactgttctattaattcatggaaggcaactgaatagttccagcttatagaatcttcctgtttggtagcatttcagcgaagcctcgttcttagccccagaacaatcatgc

SEQ ID NO: 885 - DNA, 479 bp, synthetic construct
  misc_feature 1..479: note = Description of artificial sequence: synthetic polynucleotide sequence
  source 1..479: mol_type = other DNA
catcttttgctcggtctatattcctaagcactcctagatgatactgcactggacctctggtctcacatagttagaaacagagttaaaatcgaacagcaaagagaagatattcaactgcgatgcaattgacaatggatgtttttgcaacaaacaatgattaagaagtacattgttgtgggctctgagtcaagagtaatatgggaaaaacacaagtctcttcatgaggttgacaggtttggagctggaatctgtggaggaggaaggatatgatctaggggtcagaagaagtgggttactaaaatcattaagcctggttggatgaaaagcttagactcaggggaagcagcacatgattgtgggggctggcaagtttgaaatgtgtagggcaggccagcagtctggaaacccaggcaggatttctaccttacagtcttgaggcagaattccatcttttctgggaaacctcagttttttgctct

SEQ ID NO: 886 - DNA, 478 bp, synthetic construct
  misc_feature 1..478: note = Description of artificial sequence: synthetic polynucleotide sequence
  source 1..478: mol_type = other DNA
taaggccctcaactgattgaatgaagccaacctacatcatgggagataatcagctttacttcaagttaactgatagcaaatgataattacatctacaaaatactttcacagcaacatatagactagcatttgactaagcaactgagcaccatagccaagatgacacataaaattaatcatcacaggcaccaagagatgaggggggcagtcttggccatatatttggctgaagtaagtcaatttgtcattcctgcatgagcctttataaacagaagtaagtaaccaactactatttggtcattggagttgtccaagaggccagggttctgtctaatacctgttcatgcatgaacatgccaacctagattgcatgcagactaccagttttgggtttttgtttagttcagcaggatttttctcagctcactgcctctcaaactttcagcaacaaaaggacatctgtgatatcagaatctac

SEQ ID NO: 887 - DNA, 478 bp, synthetic construct
  misc_feature 1..478: note = Description of artificial sequence: synthetic polynucleotide sequence
  source 1..478: mol_type = other DNA
cactctaagtatttggatgcaatagcaatgaatatctgagtaaatctaggtggggagtgggggcaccctgtagccaaaatgatttaacaaaatcaaaccaaaattttggaaatgatgccttggtacaatgaagagactacttgaggtaggtttgacttatctaatatcttattttctttaccaatacctaatgaggaatttaaatatttctagatagctttggaaaggtcccttaaagaggcaccagcataccactgccagatctaatccccccaaacactgttttcatcatcatcatgtcatctcttgtctctatagatcatatcaaatccttcccagagtttttcaggccttttgacaactagccacatttcactaagccaactcatctaccactcttcaacaaaacttttcctcaagttgagctgctccaccaacaccactgccatgagctcattcccacttctgtggctttgct

SEQ ID NO: 888 - DNA, 361 bp, synthetic construct
  misc_feature 1..361: note = Description of artificial sequence: synthetic polynucleotide sequence
  source 1..361: mol_type = other DNA
catgttggttatttttttggagtgtcctccctattccttcttacttgtcccaatcccaacttttggcatggtctactttaagatacagtaatgagtaactttattattataacaccaggcttctgttctaagacattagaagtgtgtttagactagctcatttaatcctcacagtagccctctgaagtacttactccctgcttcccattttataggtgaggaagaaaaacatgaagaggttaactaacttgcccaaggtatatagctaataatataagggccaataaattgattcagcaatccaggtgtccaagtccagaatccacacccatacactacactctgcttttttaaaatttaa

SEQ ID NO: 889 - DNA, 358 bp, synthetic construct
  misc_feature 1..358: note = Description of artificial sequence: synthetic polynucleotide sequence
  source 1..358: mol_type = other DNA
atcctcctgccttggcctcccaaagtgctgggattccaggcgtaagccactgtgcccagcctacatacacaacactctcttgcttaatctgtaagactctctcccccactcatacctttttatttttcctctgcattgtacacacaatctataccactcttaagcacatgattacagcgttattttctggctgcttctatgtgtctatattttaggtccacctggtcaatataataaagtgggatattagtgttaatgcaactatatggtatttgatatttgtctttctgtccgtttatcaatgtttcttatagtttattatataataaatttaaaaggtgtctgattttgaccaaat

SEQ ID NO: 890 - DNA, 480 bp, synthetic construct
  misc_feature 1..480: note = Description of artificial sequence: synthetic polynucleotide sequence
  source 1..480: mol_type = other DNA
ttgactaaatactaaaaaacaatattaaaataaattttgtttaattttagttgagtctatcaactcaaaaaagaataacgtacaacaataacaagtttcagaacattttttaaattactgattttatgagtataaaaataaaaaataaaaaagtataaagaaaacaaaaataatttagaatccattgcctagaaattgccatggttaagattttaatattgctcaggcccagacagctcagggctttgacattcccacacccattctctgccatcccagttctatctcatcccaaaaccatccattatgaggagagtgtacagctctaggctgcccgggagccatcccgcactctcattttgtgactcggcatcttgggagatggagtcttgggacttagcctggacatgtcccttgcatgtacttcttacaagacttttattcagatgaatattttcccttccaacttaagaagcacag

SEQ ID NO: 891 - DNA, 478 bp, synthetic construct
  misc_feature 1..478: note = Description of artificial sequence: synthetic polynucleotide sequence
  source 1..478: mol_type = other DNA
ggcttgctggttttgcttcactaaccagcaactgaagcaagacctgacttgtgaaaatgcctaatagagttcagtattagcgctgtttcaccatttcctggatctcttgcctttgtgcacatgatagaattgcacttctctgtgattaatttgtagttaagtgtggtcatgtaactcgctttggtcaattaaatgtaagcataagtgatgcgtgttatttctgggtagaagatgtaagagttggcatatgctttgccatattttctttatccatctggcatggtaaccagtaacattctaggtagtaattgctccatcagtctcagtctctgagtgactaaaattgacagagtcccctgctgaccctcaatgtacatggaacatgaacaagaataagcttttgttttttatattgagattttggagttgtttgttcctacagcattacctagtttactctaatacaacatggaaaaaa

SEQ ID NO: 892 - DNA, 479 bp, synthetic construct
  misc_feature 1..479: note = Description of artificial sequence: synthetic polynucleotide sequence
  source 1..479: mol_type = other DNA
ctggaacctataataaatagaccctacgttgccatttaaacttctagttctgaggaataataatgtggggaaatactttctatataataaaaaaatagaaaattgcaaaataaaaatatacttatgtatcattcatgtcctattaaaaatgttatttatagactcaccatattcccttcctccagaaaaacagaagtaaaaatatgaaaatgcctgtaatcatgtttttggattatggaatcaagtattgctttttacttttatgttttctgaatttttgttgtacttcactacatttttgagtgccctgatgtattactttcaaaaagaagaagaatactttctgaagccatttcaaccatccccactcacctctctagatcccagtaaccaaatacattatataggactcttcatcagtccttatcaagtttaggaagggcgatgctataccttctttaaaggacacctaccaatgt

SEQ ID NO: 893 - DNA, 479 bp, synthetic construct
  misc_feature 1..479: note = Description of artificial sequence: synthetic polynucleotide sequence
  source 1..479: mol_type = other DNA
cttagttgcctttcaaagactcctagcacagctaaatgtgatggatatgctctaaggatataagagctgaagtgacttgcataaggtcatatcataacttactgttagaaatggagctagaactcagacccactgagtccttgtctgtgacacactgccctttccatttgtggaagttgttcttgtatctaactttatctgtgctactatttgggcctagccattctccctcttatgcagacaagcagataaacagtaaaactttaggagtggattatgataccatagatatatatcatctatcctttacaaaatagttattacagtcatcaagccttggttagagtttacagaccatgtatcctagctacctcatttcacagattatgacattgggggctaagagatattaagtgacttccttaagtgaaacagtagcagaccaaaagaagtcatgattcccagcatagtgctactca

SEQ ID NO: 894 - DNA, 478 bp, synthetic construct
  misc_feature 1..478: note = Description of artificial sequence: synthetic polynucleotide sequence
  source 1..478: mol_type = other DNA
ctcatttattcattcattcacccactcacaaacctgtattaagtttctgttatttgcaagaccctgtcagttaggccatgtgggaactagaaggatgaatttatcagtcatccaagattcttacaattaagtattaccgataaggtactcaagaaacagttctcattcacataatttgggttaaaacaaaaagaagccagctttctatatacttttggtccagtctttacgttttttgttttgttttgtttgttttcatgagtatcccgacttccttctaagaacttccacctgagaactgaccacagcgtcagcattccacatgggtgtgtttcctttcccctttcccatttcagtggtttccaatttctttttcttttggcactataaacctttcgcaaaggaaatattagacagaactcctacatgtcaagcaaattaaaatagtggtgaaattagagtggaggacataatcacc

SEQ ID NO: 895 - DNA, 479 bp, synthetic construct
  misc_feature 1..479: note = Description of artificial sequence: synthetic polynucleotide sequence
  source 1..479: mol_type = other DNA
ctatcatataggctatttgtccatatcatatttgtccctacaaaggcctctaaggcaggggtccccaacctctgggccgcagaccggtaccagtggcctgttaggaactgagccacacagcaggaggtgagcgggagacaagcgggcactactacctgagctctacctcctgtgagatcagcagcagcattagattctcatagaagcgtgaatcctattgtgaactgcacatatgagggatctaggttgtgtgctccttatgaaaatctaatgtctgacgatctgaggtggaacaggttcatcctgaaactatagcctacccccactcccacacccaatccatggaaaaattgtcttccctgaaaccagtccctggtgccaaaaatgttggggaccactgctctaagataccttgtgcttcttggaacatatttggaaaatcatgtagctctcaaattatccctatgtcctgaagccca

SEQ ID NO: 896 - DNA, 479 bp, synthetic construct
  misc_feature 1..479: note = Description of artificial sequence: synthetic polynucleotide sequence
  source 1..479: mol_type = other DNA
ccttaccatcaatcctcagaaatacccaacccatgtcaggcaacttcacactttctttcttcaggcagcacagttgtctcagggagggaggagagtgctattagcaagaggagtcactaacagcttcactcacctgtgcccatgaatttttaatggtgtgaaaagtctgtgtattttttatggttctctatggctcatataagagggacaaacaatacatgaaagttcagagatggggacaaatatcactttaagctggggataatcagggaagaagaaagttttcatggagaaggtgacttttgaatcaggaagaaatggaaacagcaaactcttctagatagaggagacactaacaggaaaggcagagaggcaggaaggtgtgggaaagtgcacgtgaccccgttcagagagaaagccaggtgtgagataagggggaaagactgttagggcatgtattgtaaaccactaattccagg

SEQ ID NO: 897 - DNA, 478 bp, synthetic construct
  misc_feature 1..478: note = Description of artificial sequence: synthetic polynucleotide sequence
  source 1..478: mol_type = other DNA
caaaagttagattttacttactaagcaagagtgcttcagttagatcctagcaggaaatggagggtatgcttagaagaggtaactgaggcaagtttaatttataaaggtgtgtgcagcattaagggaaaccagcaagggatactgagcatgccaggatgcaagagcaggcagggaaggtgactattcctaggtctgaaggagaaaggggagggagcagttcccagaaccctagtaaaaatggcaatgagaaaggtccatctggcaggacctatggtctttaacagagggacaaagtcaacccacaacttgtctgggaggttgctgaggaatagataccccaacctctctctcaacccactgcaacactctttttcccctagactgagcccagtcaaagacagagggaggagcccagtgatgcagtctgcaatgtcatcatcctggagcatgaatagagtgcagcagggtgaataatgag

SEQ ID NO: 898 - DNA, 121 bp, synthetic construct
  misc_feature 1..121: note = Description of artificial sequence: synthetic polynucleotide sequence
  source 1..121: mol_type = other DNA
tctgcaggaattaatagaaatatctgacacaatagggaactataagaggttttgaataggagaggcccctgaaatgtgctccaatattactgaactatgtgtggcccaaagaatggaagag

SEQ ID NO: 899 - DNA, 285 bp, synthetic construct
  misc_feature 1..285: note = Description of artificial sequence: synthetic polynucleotide sequence
  source 1..285: mol_type = other DNA
gaacagctcttgcaataggtctgaggagagaagctgaagacttggactagggcaatggtaaaaactgtggaaagaagttttaaatgaaaagttttaaaccatgcggcttccagctagatgaacttttttaaaaaaattagttcctcactcaaattttggggaggttatatattttctaatcataaaaaatgatttttcttatttgtgggcttttctccccagatctgaacctgtggtcttgggagccagggtgacctgatatgacatctaaagaagcttctggac

SEQ ID NO: 900 - DNA, 360 bp, synthetic construct
  misc_feature 1..360: note = Description of artificial sequence: synthetic polynucleotide sequence
  source 1..360: mol_type = other DNA
gcctaggaaacagaatgagaccctgtctcaaaaagaaaaaaaaaaagttaccagtttggtagcttagggagttacaagtttggtagctcatggagttgccatagacatagaatatattgatttttaatcacagcacacaacaagatgtacatttatatccttgtgagtaagtgaatatggttgagagaagaggttaggttgacaaagcaactactaaaaaattgtctttttccctctgtcttatgggtaacttggatgaaaacatagaagatgagcttataatatatgatgattaataaagtagggagagagagtcagttggatagaagagtttctatttcaaaatcccaggttgccaca

SEQ ID NO: 901 - DNA, 359 bp, synthetic construct
  misc_feature 1..359: note = Description of artificial sequence: synthetic polynucleotide sequence
  source 1..359: mol_type = other DNA
actccagcctgtacaacagcatgacgccctgcctcaaaaaataaaaataaaaaataaaaaaattaagtcccaggttgaatcacgaggtcaaaaccaaagaggtagaatgaaaggtcctgcttttgatccacacacctaagatggaagagcagtttattagcagttaatatgaaaaagttctggggatttaatagaaaagaatttaaacagtatcatactcataaactacaaatgtgccctaagtacaaatgcaggttgaattgaaatccaattgcttaaaaactaaggaggttgggcatggtggttcatgcctataatcccagcccattaagaggccaaggcaggtggatcacttgagc

SEQ ID NO: 902 - DNA, 475 bp, synthetic construct
  misc_feature 1..475: note = Description of artificial sequence: synthetic polynucleotide sequence
  source 1..475: mol_type = other DNA
taggaggatcacctgagcccaaggagatcaaagctgcaatgggccatgacctcaccactgcactccagcctaggcaacaaagtgagaccctgtctcaaaacaaaacaaaaacactaaggagaacttcagcagtgttgacaggacactgttcagaactgggaacaaatagtcctatggaacctactatgtctaggccagcctacctctagaatattttgttctattctgggcccgacttgttaattgggacatgaataaatgagagtagatctagagggaagcacccaagatggcaatcgggcttgaagccacccctagactaggaatattggaagaagctgggcgcatttctcctggagaagaattatcaagggaagacatgagagccaagatcaatgggtgcaagttacattgaagaagaatttggcccagaaatggaaagaattcactaacaactagagctgttcatcaaagg

SEQ ID NO: 903 - DNA, 477 bp, synthetic construct
  misc_feature 1..477: note = Description of artificial sequence: synthetic polynucleotide sequence
  source 1..477: mol_type = other DNA
ttaacctcctggttcctggatatatctacatagcctggagctaccatttttcaggatactctggaaagtattcttcccttaggtgatgaattacaaatcttcttactctaagatcccataattcttcaaactagacacttaactcctatgagcctcagtttcctgagaagactaaaatgaaatggcttgtaaatccccttccagctctaactttctatgaagtacttggtcctaaagggtaccctcgtttatgtttcacagagataccagaaacaggagtcttttatcttcaacttgactctcaagatgttatcctcaagtgaacttttttctaccagctgaaatatgtccttaaaatctttgagtcaatgaatcatgaaatgagccaggttttcaaatctcatttgtagggttccttaagaactatgtccacttgccacattcttttctgaatattattctttttttcttcaaccc

SEQ ID NO: 904 - DNA, 476 bp, synthetic construct
  misc_feature 1..476: note = Description of artificial sequence: synthetic polynucleotide sequence
  source 1..476: mol_type = other DNA
tgttttttaacccaaacatcctgttttcaaacatcctgttttcaaccctctttgtatctaaggatggaacaaggctgatgacacagacaagaaacttgtaaaacatagcaagtatctgccttttatttggtgaataatgtcaggactagagaagggctgatgtgaaattctgggctgggctttaaggctttaaggcatagttttgcctcaaagaattgcctccacacaggacaagtcactgtaagcaaagtatgtggctgcatctggacatgacaggaggtgagctgggaagtccctgccctttccctgcacatgcacttaccccatttctccatctttctacctcaacacttcaccttcagagataatttctttcaggcctcaaagcatttttagactttaagttcttttgttgctgtttattagctcaaccagggccatgtaccagaacctgggggaaagggccatttctatgg

SEQ ID NO: 905 - DNA, 477 bp, synthetic construct
  misc_feature 1..477: note = Description of artificial sequence: synthetic polynucleotide sequence
  source 1..477: mol_type = other DNA
aaatggagatagggtccaggcctatcctgagaaagtgcaatcatgaggagaccatcctgttctttctcatgtattttatcattcatttggtactaagcactgtactaggcaccaagatagatagtaaaacatcagccttgtcttcaaagggtttgcagatcacagaagccctctctctctctcatcttttacatagatgatatcctatataacaagaagagatgtcacaggatgactaaaacaggcaaagcagctggaatatgtgtgtggctggggcagcccatgacagggccttaaccctagtaatgacgctgacagctttagtcactgaggggagtggccagaacctgctggtttggtcaatgggggacaacaatcaagtaagggaaaagtgatcttataaggactggagggaagtcaacagaaaatctcagccaagtgccatacatttttttctatagagttctatattttctg

SEQ ID NO: 906 - DNA, 478 bp, synthetic construct
  misc_feature 1..478: note = Description of artificial sequence: synthetic polynucleotide sequence
  source 1..478: mol_type = other DNA
gaactcatatacagaattaagtaagagtcaccctgggctatattggtaagggcaaagagctggaatttcttacaactttattttgaagcctcaagcagcggaaggcagatggaagaagtaacatgtggtggtggttctcagaatttttaccacccccaaaacatggaagataattcctcactctccggtcagtaacaaccactgacttctgcaaagattcacagccatttggggtacatatcagaatatcatggagaagcaggaagtggggagcaatttcataaagcttcctacttgagtctaatataaccctttcctacctgccctgagatctataggtagcttgcctgagttgaatccagctctgccattaaccagctgcatgactacagacaagtcgttctctttgaaccttagtttcctcatacataaaataacgaaccttacctggcagtgttattgagaggaactacagaac

SEQ ID NO: 907 - DNA, 1311 bp, synthetic construct
  misc_feature 1..1311: note = Description of artificial sequence: synthetic polynucleotide sequence
  source 1..1311: mol_type = other DNA
aattagctactagtacaataatttgttttaaaagctatattataggataacagagtctactcagtcagcctttatgcaaaagtgaaaatcttgggattctcagaaatatgctctcaacagtaaatgccctatgtaacaaggtgcaccagcttaggctggggccattgggcccataaaatcttcattgttaaagttaagaagttgggtacaaggacagagaaaagctactattcccaagttgccaaattaaaaaaattacctatctggaaggtaaattttttttaccccttaacagatctttaagtgtataatagaagggagattcaaaatttacatttgaaactgattgtttgaggggaaaaaatctaaataaaaattttaacaatcatataaatataaagccaagatcttaatctggaatgggaaggttaagaccattcattaattcaacaaatatttactgagcagccctgagactgttttccttggggtctgggaaggggagccatggtcaatggactcttgttatctgtaggaatattgatccctaccacaaggtacagggacagggaataaaggggagatagtcctcctatgagataaaggtaggggatgttctacagggcccagttttatatttttcttttctgccttgttatttcttctcatgattttctttcagtaaaatctctttcccacatctctttcagtaaaattttgttaaatgatagtcttgttctctgttttggggaattacaagatggactcttaatggggctctattagtagatggtaagaattcctgggaatttccagaaattctttgggaaaagtcagagactaatcttctcacagttacataaggggatgaagctgaaagttatttgggcattaattagaagtgtggcccactgaaggctggtgaaatctggacacctctgctatacatggtccttgtggatggtttgaatgatattcccaaattggctgggcacattcccatgatatcaggccgatgggcattaaaaatgcaaattagttcacatgctggggtacaatgccctgaaccagctgactttaatggactgcagattgccaatccaaggctatgttctttcattcctttccttgccttacttacttatcattcatccttcccctaagttctcttgggcctattgcccaaataaaagtgaagaagaaattaacacatatgaaagcgtgctatgctaagtaccatgtggggtgtgttttgcatgaattattttacttaaccccttacaacaccttggcaagataggcaggattatc

SEQ ID NO: 908 - DNA, 121 bp, synthetic construct
  misc_feature 1..121: note = Description of artificial sequence: synthetic polynucleotide sequence
  source 1..121: mol_type = other DNA
tcggtgactgatgatctaagtttcccgaggtttctcagagcctctctggttctttcaatcggggatgtctgcagagggcagaaagaaaacaggcgttagaaacctgaggtcaaagatgtgt

SEQ ID NO: 909 - DNA, 121 bp, synthetic construct
  misc_feature 1..121: note = Description of artificial sequence: synthetic polynucleotide sequence
  source 1..121: mol_type = other DNA
aggctctggcgctcctcggcggaatcccgtagcttccctacgcatgcctgcttctacaaacccacaaatggtttccgatcatttctgaaacaaaatggatgctcatttattcatgtgctct

SEQ ID NO: 910 - DNA, 308 bp, synthetic construct
  misc_feature 1..308: note = Description of artificial sequence: synthetic polynucleotide sequence
  source 1..308: mol_type = other DNA
cctgagggaccttccgcggcatctatgcgggcatggttactgcctctggtgccccccgcagccgcgcgcaggtaccgtgcgacatcgcgatggcccagctcctcagccaggtccacgggcagacggccccaggcatcgcgcacgtccagccgcgccccggcccggtgcagcaccaccagcgtgtccaggaagccctcccgggcagcgtcgtgcacgggtcgggtgagagtggcggggtcggcgcagttgggctccgcgccgtggagcagcagcagctccgccactcgggcgctgcccatcatcatgac

SEQ ID NO: 911 - DNA, 151 bp, synthetic construct
  misc_feature 1..151: note = Description of artificial sequence: synthetic polynucleotide sequence
  source 1..151: mol_type = other DNA
cctggatcggcctccgaccgtaactattcggtgcgttgggcagcgcccccgcctccagcagcgcccgcacctcctctacccgaccccgggccgcggccgtggccagccagtcagccgaaggctccatgctgctccccgccgccggctccat

SEQ ID NO: 912 - DNA, 194 bp, synthetic construct
  misc_feature 1..194: note = Description of artificial sequence: synthetic polynucleotide sequence
  source 1..194: mol_type = other DNA
cctggtcttctaggaagcggctgctgccctagacgctggctcctcagtagcatcagcacgagggccacagcggcgggcgcccctggcgctgcccactcccccgtgagccgcgggatgtgaaccacgaaaaccctcactcgcggcgggccgcacgcgcgccgaatccggagggtcaccaagaacctgcgcaccat

SEQ ID NO: 913 - DNA, 121 bp, synthetic construct
  misc_feature 1..121: note = Description of artificial sequence: synthetic polynucleotide sequence
  source 1..121: mol_type = other DNA
ccttttttcaactggacaacaagtgtcaaaaccctgtggatgtatagggtaaaacaagattggtcacgaaaagagaattgtttctataactggtaatctgacacaatgtcctattgccatt

SEQ ID NO: 914 - DNA, 121 bp, synthetic construct
  misc_feature 1..121: note = Description of artificial sequence: synthetic polynucleotide sequence
  source 1..121: mol_type = other DNA
aggtcccttttcagtttattcaagtttgttttcatggtgttttatccctcttgataaaaaaaaattcagacttttgtaatttgtgtatgctgatcttcatcaaaaggttcattctctggat

SEQ ID NO: 915 - DNA, 121 bp, synthetic construct
  misc_feature 1..121: note = Description of artificial sequence: synthetic polynucleotide sequence
  source 1..121: mol_type = other DNA
ggtgccatcagtgtttggtgcccgcctggctccaagggtcagtgacggtcataggcagtggcggctgcaggtggggcggctcctcgggcggcagcgctataatagtagggggagcctggaa

SEQ ID NO: 916 - DNA, 121 bp, synthetic construct
  misc_feature 1..121: note = Description of artificial sequence: synthetic polynucleotide sequence
  source 1..121: mol_type = other DNA
cctccgccagtactcaccaagcagccccgggttggggaacctccaggagtcgttgtacgaggaatactgagggtggctgtagggactcccggaaaactcactccctgtgtatggtgggtgg

SEQ ID NO: 917 - DNA, 121 bp, synthetic construct
  misc_feature 1..121: note = Description of artificial sequence: synthetic polynucleotide sequence
  source 1..121: mol_type = other DNA
gcaaactcaccaggcaccatccctgtcagcgtcggtgctgagtagctgccctgtccagcgggggggacgtgtggagggtacccggggagggtcgtgctcgccaagtcacggcctgaggaat

SEQ ID NO: 918 - DNA, 121 bp, synthetic construct
  misc_feature 1..121: note = Description of artificial sequence: synthetic polynucleotide sequence
  source 1..121: mol_type = other DNA
cacaatggggtaggactgcgggcctggcacactgctcccgatgtcagcaggggtggggctggccagattggccttcatgtcgtccagcccaccagccagcgaggccatggctgaatactct

SEQ ID NO: 919 - DNA, 177 bp, synthetic construct
  misc_feature 1..177: note = Description of artificial sequence: synthetic polynucleotide sequence
  source 1..177: mol_type = other DNA
cctgctcgggcttgatgggctctgtggtggtgaagatgtctgagtagtgctgcctctcaaacacgcggtccagcacctccagctgctgctgtgtgaacaagtctccccgcatctgcttccggaggaagtctctgcccggaagcgagtggccgttcggcaccggagactcctgaatac

SEQ ID NO: 920 - DNA, 121 bp, synthetic construct
  misc_feature 1..121: note = Description of artificial sequence: synthetic polynucleotide sequence
  source 1..121: mol_type = other DNA
gtctctcttgcgcttgttggtgtcggcgctgggggacgtgatgcccaggatgccgctgatggagtacgacgagccggccgaatccgtgctcaccgaggacacctgcgtcacggagccagtg

SEQ ID NO: 921 - DNA, 121 bp, synthetic construct
  misc_feature 1..121: note = Description of artificial sequence: synthetic polynucleotide sequence
  source 1..121: mol_type = other DNA
ttaaattttttttaaaagttcctcttacctatgctgtgactggaagctgggactggttggttgggtggctgctgtacttttgtccggatgatcctgtgggcagttgaaaaacaaaattgct

SEQ ID NO: 922 - DNA, 199 bp, synthetic construct
  misc_feature 1..199: note = Description of artificial sequence: synthetic polynucleotide sequence
  source 1..199: mol_type = other DNA
cctgttgatggaactgacgctaggcacggtgtcattgtcacacacccgctctgccagcagccggtccctgatctcccaggcaaacatggtgggattttggcgtttatattcagcgattttttccaccactttgggtgtggcgacctttggtttggatcctccaattaccccaggcttgatgcttcctgtctcataatac

SEQ ID NO: 923 - DNA, 167 bp, synthetic construct
  misc_feature 1..167: note = Description of artificial sequence: synthetic polynucleotide sequence
  source 1..167: mol_type = other DNA
cctgccaagaattttgctgacacaaccatggctgacccgaagctgcctggagatgtcgcagggcctgacaccttgatgagcaagttccactatcctctggcggactacatccgggagtggccgtccattcacaaaaacccccccaagctgattcactcctccatgtc

SEQ ID NO: 924 - DNA, 121 bp, synthetic construct
  misc_feature 1..121: note = Description of artificial sequence: synthetic polynucleotide sequence
  source 1..121: mol_type = other DNA
cggagtttgcacatctggagcccgtatcgcggtcctacctgtcctgctggtccgaggagtcggataatttttctctaaatccattttgatttttcaggacttgatggaatggacagggaaa

SEQ ID NO: 925 - DNA, 121 bp, synthetic construct
  misc_feature 1..121: note = Description of artificial sequence: synthetic polynucleotide sequence
  source 1..121: mol_type = other DNA
gtccacgggctggtagaagggccaggcgaactggtgtttccagagcgtcttcaccaccacattctgcatgtactgcagctggttggtcttgcggccgggcttgctggggttggagacctcc

SEQ ID NO: 926 - DNA, 121 bp, synthetic construct
  misc_feature 1..121: note = Description of artificial sequence: synthetic polynucleotide sequence
  source 1..121: mol_type = other DNA
gtgggttcacagggcccggggtcgccgggatccccgcgggggcgactgtcgtggcggtggacatcctccggcagctcactcactttctgtcacagcagcggcttggagaggccctggctgc

SEQ ID NO: 927 - DNA, 121 bp, synthetic construct
  misc_feature 1..121: note = Description of artificial sequence: synthetic polynucleotide sequence
  source 1..121: mol_type = other DNA
cccccagcttataaaaattctttccaagagagggaaaggcaaagtcgaattccagcagtaaaagtgacttactttgcacattttcttcttcctcttcccgcctccccgagtgcaccaccat

SEQ ID NO: 928 - DNA, 121 bp, synthetic construct
  misc_feature 1..121: note = Description of artificial sequence: synthetic polynucleotide sequence
  source 1..121: mol_type = other DNA
ctggaaacactgcaggaaacaggggggctcctttccctggagaacctggaccttccgatttaaacagaggtaaataggtaaggggcgcggggctttcaaagtcctaaaaacaatacatgcc

SEQ ID NO: 929 - DNA, 121 bp, synthetic construct
  misc_feature 1..121: note = Description of artificial sequence: synthetic polynucleotide sequence
  source 1..121: mol_type = other DNA
atctgttccttgaaaataatctagtttaaaattaacacttaagtgtctgcctaccttgcttcacggtttagcaccaggggaggaagctgctgatggtcccccactaacacaaatctccgtg

SEQ ID NO: 930 - DNA, 121 bp, synthetic construct
  misc_feature 1..121: note = Description of artificial sequence: synthetic polynucleotide sequence
  source 1..121: mol_type = other DNA
agggggcccagacaaattggttggctaatttgagaggcttcatccacaatacaaaaatcaaaaattttacgggaaaatattggatggtttattcccatacatgttgttgcaactataagct

SEQ ID NO: 931 - DNA, 121 bp, synthetic construct
  misc_feature 1..121: note = Description of artificial sequence: synthetic polynucleotide sequence
  source 1..121: mol_type = other DNA
attcctccaattcaggacccacacgacgggaagacaagttcatgtactttgagttccctcagccgttacctgtgtgtggtgatatcaaagtagagttcttccacaaacagaacaagatgct

SEQ ID NO: 932 - DNA, 121 bp, synthetic construct
  misc_feature 1..121: note = Description of artificial sequence: synthetic polynucleotide sequence
  source 1..121: mol_type = other DNA
aggtttgtactttactttcattgggagaaatatccaaaataaggacagattaaaagctatattttattttatgacatgtaaggaactataatttgttttctattagatctgcaggtgtttt

SEQ ID NO: 933 - DNA, 121 bp, synthetic construct
  misc_feature 1..121: note = Description of artificial sequence: synthetic polynucleotide sequence
  source 1..121: mol_type = other DNA
acattacttaagactcagtcagatgcgataataacacagcagcttgtaaaagacaaactacgagccaccacacaaaatttaggttctttttatatgcagagtccacttttaaattcagaac

SEQ ID NO: 934 - DNA, 121 bp, synthetic construct
  misc_feature 1..121: note = Description of artificial sequence: synthetic polynucleotide sequence
  source 1..121: mol_type = other DNA
actataattgttcagacttcaaaaggattcttaataccattgaacattactaacaagcctgggctaccagttattcctggaaatgcacttccattggttaattcacaaggtatccctgctt

SEQ ID NO: 935 - DNA, 121 bp, synthetic construct
  misc_feature 1..121: note = Description of artificial sequence: synthetic polynucleotide sequence
  source 1..121: mol_type = other DNA
ccaaattgcattgtaaggactattaaggtttacttacctttaaatttaatatccagaccactaaattccaattcaaccccttgaagtgcttctcccagagtttcatggtaatgactgatac

SEQ ID NO: 936 - DNA, 121 bp, synthetic construct
  misc_feature 1..121: note = Description of artificial sequence: synthetic polynucleotide sequence
  source 1..121: mol_type = other DNA
tgaccccacacagaatggaagtgaaaagtacttatatgtttcttgacgattatggtagggcccaacagtattcatccataagacaacttcctctttatcttgatactgaaacaagaaaagc

SEQ ID NO: 937 - DNA, 121 bp, synthetic construct
  misc_feature 1..121: note = Description of artificial sequence: synthetic polynucleotide sequence
  source 1..121: mol_type = other DNA
cgagattactattaagtctccagagaaaatcgaagaagtcctgtcacctgaaggctccccttcaaaatcgccatccaagaaaaagaagaaattccgcactccttcttttctgaaaaagaac

SEQ ID NO: 938 - DNA, 121 bp, synthetic construct
  misc_feature 1..121: note = Description of artificial sequence: synthetic polynucleotide sequence
  source 1..121: mol_type = other DNA
aggagaaagttgaggcctaaataaagtctttttataattattattataacaatgtgacattgcacatctaaataccacatttaagttgatcattaatatgcaatggtagatcagattgggg

SEQ ID NO: 939 - DNA, 121 bp, synthetic construct
  misc_feature 1..121: note = Description of artificial sequence: synthetic polynucleotide sequence
  source 1..121: mol_type = other DNA
gggccttgtgctgggtccaattcacaagaaccagaaggatgatgtcgctcagactgacttgctgcagatcgaccccaattttggctccaaggaagattttgacagtctcttgcaatcggct

SEQ ID NO: 940 - DNA, 121 bp, synthetic construct
  misc_feature 1..121: note = Description of artificial sequence: synthetic polynucleotide sequence
  source 1..121: mol_type = other DNA
agagtgggtatcctggggttcccaaggaaacagctagaaaggacttggccagaggaaaagtaggctagaacttttgtctggtttcctgctaactggctctgagttttcctagggcaggtag

SEQ ID NO: 941 - DNA, 215 bp, synthetic construct
  misc_feature 1..215: note = Description of artificial sequence: synthetic polynucleotide sequence
  source 1..215: mol_type = other DNA
agataaaggcagtggacaatgggcgcccacagaaatcctccacggcccgcctccacattgaatggattaagaaaccacccccttcacctataccattgaccttcgatgagccgttttataacttcacagtcatggaaagtgatagagtgactgaaattgtaggggtggtgtctgtgcagccagctaacacccctctgtggtttgacatagttggt

SEQ ID NO: 942 - DNA, 121 bp, synthetic construct
  misc_feature 1..121: note = Description of artificial sequence: synthetic polynucleotide sequence
  source 1..121: mol_type = other DNA
ccacttggttaaggtgtatgactatcaagaagatggttcggtacttctgacttgtgatgcagaagccaaaaatatcacatggtttaaagatgggaagatgatcggcttcctaactgaagat

SEQ ID NO: 943 - DNA, 121 bp, synthetic construct
  misc_feature 1..121: note = Description of artificial sequence: synthetic polynucleotide sequence
  source 1..121: mol_type = other DNA
atggaatctgggaagtaatgccaaggaccctcgagggatgtatcagtgtaaaggatcacagaacaagtcaaaaccactccaagtgtattacagaagtatgtaatcccctttggtctgtttg

SEQ ID NO: 944 - DNA, 121 bp, synthetic construct
  misc_feature 1..121: note = Description of artificial sequence: synthetic polynucleotide sequence
  source 1..121: mol_type = other DNA
gagtgagaagcaggtaagcaatgacaaaaggaaggaccacctcagtccttagcaccgtgttaacacctttcatgtcccagtatatccaaagaactcaaacttgccttccttcttggccccc

SEQ ID NO: 945 - DNA, 121 bp, synthetic construct
  misc_feature 1..121: note = Description of artificial sequence: synthetic polynucleotide sequence
  source 1..121: mol_type = other DNA
tgctattctttgctttttccttgggcttttccccccgtgtctcaatcatggacctcacaggtttcttggccttttcagaatcttcaaatttcttcatggtagtgggagcacggatcttact

SEQ ID NO: 946 - DNA, 121 bp, synthetic construct
  misc_feature 1..121: note = Description of artificial sequence: synthetic polynucleotide sequence
  source 1..121: mol_type = other DNA
accgtacgggcaacttctgaagggataccaggagtgacagaatagtctctagcctgggccttcgagaccgcatacaaagagggcaaaggaattttacttctttagcttgccagctggatcc

SEQ ID NO: 947 - DNA, 121 bp, synthetic construct
  misc_feature 1..121: note = Description of artificial sequence: synthetic polynucleotide sequence
  source 1..121: mol_type = other DNA
tgggaacttgatttaggaagaggaacacagctgttatggaaccagtctttgcagagctcacactgtagcataaacccactggctgtcttgcggcaaatgcaaaattttacttcttctatgc

SEQ ID NO: 948 - DNA, 121 bp, synthetic construct
  misc_feature 1..121: note = Description of artificial sequence: synthetic polynucleotide sequence
  source 1..121: mol_type = other DNA
gtggaaaaaacctgagaacttcctgatctctctcgctgtgagacatgtctgagactcctgctcagtgtagcattaaggtaaaaatcttctcccctccttctacgtggtggaaaccctgagc

SEQ ID NO: 949 - DNA, 121 bp, synthetic construct
  misc_feature 1..121: note = Description of artificial sequence: synthetic polynucleotide sequence
  source 1..121: mol_type = other DNA
aacgaatttcatatacacctccagagagcccagtgccgagttacgcttcctcgacgccacttcatgttccagtgcctcgagcgctcaggatggaggaagactcgatccgcctgcctgcgca

SEQ ID NO: 950 - DNA, 479 bp, synthetic construct
  misc_feature 1..479: note = Description of artificial sequence: synthetic polynucleotide sequence
  source 1..479: mol_type = other DNA
ctgacctcgtgatccgcccacttcaacctcccaaagtgctgggattacaggcgtgagccaccgcacctggctggaatggagcattttacttgagacctctgtgagctggtcctgagtatgagtagtgaattccaacccacttttctcctaatccctgtcgtgtcctagagtgagaatatacagaggggttggaagtgggtttatgttcatgggctttctagatggactttcaagtccaagtagaagtccaacttgagagctcgtgtagaaagcccttgaatgtaaacccgtgaagaaaagcacttccttatttcagaaagagcacaaaagaccagcaatccaaaggcatttcgaagaccttgaaagagctgggagtggcttaggtatggagggtgcatgtgtgagtacaaatggcccctcagctcagaaccaagcatctgtgtgccatgatccatggttcctaaatatcatggagggca

SEQ ID NO: 951 - DNA, 480 bp, synthetic construct
  misc_feature 1..480: note = Description of artificial sequence: synthetic polynucleotide sequence
  source 1..480: mol_type = other DNA
aaaagtataaatgtgaattaatgcaagagaaaccacactgaaataaaaaatacctgtggtctcttgagattcaagttggcaaaatccaatctaaaagatgtctgactatcacaattagtgaagtccacaggtcagattttcctctctgttcctgattaggattaacctggaaaggtggattgggtccatctttaataataactacaccttctgaaagatttgaaactattattatctctttgtttgctgctgctttcatagatttatggtaggacttggggttagatggatgatccaggtcacctattccagcctcacactctgcctctattccaaatatgacatcactgagcgatggccacccaccttcccttggatacctctaacaatgggaatctcactgtttcacaggcagctcttttttttttaaacacctccaattccaatttttaaacacctccaatgtccagaaagttcttt

SEQ ID NO: 952 - DNA, 479 bp, synthetic construct
  misc_feature 1..479: note = Description of artificial sequence: synthetic polynucleotide sequence
  source 1..479: mol_type = other DNA
aaactcttaaatacatgacatttattaaaacaaagcctcaaaccactttcagagtggtggtacagcaaataattgattcttttcagggtttttcccccctgtgttttttgtcttctctaactcaaatcattgcccggatattgcttataacaggagctcagcctcaaccagtctttctgcttttaccacatgctctagtggaatctagattaccggactcatttcgaatctaactaaaaatgagaaatgctctgtttatataaagcttggcaatcaataggaaaaggaaaggctgtttagcaaaggccagtgataattccaagaagcagtgtcttttggaatatgctatggtgacctggccactgcagctatctgcttatctgtctggtttcagatttccagaaaggactcgctgccttcgaaacacttcccagcccttccttgggtgcctggatttctaccattagcagtttactcct

SEQ ID NO: 953 - DNA, 241 bp, synthetic construct
  misc_feature 1..241: note = Description of artificial sequence: synthetic polynucleotide sequence
  source 1..241: mol_type = other DNA
tgagcatggatttttgcagaaagacatgtagaccagggagatggctcattaagctcttggtggtcatttcaccagagcatttagcatttttaaatcccttcctggatgcttgttttagtgatgatggtggtggtgagatgaagcagggatgtgtagatcatgaagggatgggaaaggggatgatttggttggaacgaagcaaaataacatttctgagtgcctgctaaggtccagcactttt

SEQ ID NO: 954 - DNA, 240 bp, synthetic construct
  misc_feature 1..240: note = Description of artificial sequence: synthetic polynucleotide sequence
  source 1..240: mol_type = other DNA
cacacgtaaaattttcacaacaatccctgtgagttgggatccagtttctacagatgaggaaatgaagacaggagactagatgacctgaccaggtcctaggccagtcaggaacagagctgggatttaaaccagagctgcctggtccaaaacctgtgctggtcctgctattttatgacacctagaagggaaaagggcagagaactggaaagctgagatggaatcacctacttaagaattttg

SEQ ID NO: 955 - DNA, 240 bp, synthetic construct
  misc_feature 1..240: note = Description of artificial sequence: synthetic polynucleotide sequence
  source 1..240: mol_type = other DNA
cagaaggctaaccctgtctaaaagcatcgctttgcaatcagacacatgtggcagtaaaaatgtcccaatgctaactcattttaagccttggttttagtctacctaaaatttatagaacactgtaaaatatgctacatgtaataagatatttattaggagtcttcttgcacttgttcagaatgctttttattatgtttctgctcattattgtagatattctcccattttggagaaattgac

SEQ ID NO: 956 - DNA, 240 bp, synthetic construct
  misc_feature 1..240: note = Description of artificial sequence: synthetic polynucleotide sequence
  source 1..240: mol_type = other DNA
cgcgtgcacactcttcactggagttttgcacaaatcttaccagaaaactggtgaagatcagtcctgaggccccttccgcctctaattccttgcagtattttggctgtactatgtgctgttacactagatcacaataagcagctgccagtttcctcacaggttcccttggggaaggatatgggaataattcttaggaaccccccacaaattatagcaaccaatgcagtaaaacccctttag

SEQ ID NO: 957 - DNA, 478 bp, synthetic construct
  misc_feature 1..478: note = Description of artificial sequence: synthetic polynucleotide sequence
  source 1..478: mol_type = other DNA
ctcactcctccccctgtgctcactcacatactcaaatatatttagtgctttccttcctctcactccgacacttttgggagagccctgggggtggttgagtaccttgtccttgggtggattttcttgttttctgagactggctgccatcagacttcgggagaggatcttaccagaggcgggtctcttcttcccccgccaccgccctcagtattctttcacagccaccacaaagccacgctttctctgctaagtacacattcctaggactgtaacaaaaggcttctgtgagtttgaaagctgcaggggaggctcctgcgtgaaggcctaagatttaaagggtttcatttctcctgtgctggggactgtattgagtgcagtttgaaatctgcttcaccaccacaaggggaaatagaaatcagccctaaagctgcatggagaccccggctggtctttatcctcatagcttagtgatttcctg

SEQ ID NO: 958 - DNA, 479 bp, synthetic construct
  misc_feature 1..479: note = Description of artificial sequence: synthetic polynucleotide sequence
  source 1..479: mol_type = other DNA
ccacccaagaggcagtgaggggctccctgacattccggaggccccaggaaccctggctgcggtgacccggtgctggggagggagtgcatggggtaggctcctggttgtgagccttcagttcgccgggatgtctatgctgtgctgtgtggctacttagccaaggctgtgcatgccagccggagccaacagcttcagcaaacctgccctccggggagagtggatttcattgttttcaaagagatacaggaaatcagaattttccatccttccatggagagacttggattggactgagaagagaaccagcattaaaaaggaagtctccttccctttcttccctgcccctcctcaccccagccccagcccacccgccaggggcacaccctccctctgccggcctttgggtggaaaccttcctgcctgcagcacaggcagtgtgaactgcggggctgtctgagcaacccagctcttgccttttc

SEQ ID NO: 959 - DNA, 480 bp, synthetic construct
  misc_feature 1..480: note = Description of artificial sequence: synthetic polynucleotide sequence
  source 1..480: mol_type = other DNA
agtagcagaggtaatgtggccacgactcagaattatgggaccccagatgctgaggaagtaaactgacttcttttcagctcacagcagacgcatagacaacagagtagatttcatgttctaatgaaacagtgtagaaactctgtccttggtggctcagtactgtgtggtatgagcctctgcctccctccctccctccctctttccttctcttttcctcccccaccccttcacggcctgccctttcctgattcttcagaactgacaactataaatccagcccaaattcctttaaacaaagggtcaccaagagcacgaccttgaaaagacttcttgtgatatgcacttgcagagttgcatattgttccttggatttaggacaggccaaagaaatcttccactttatttaagaagagcctgtgtggttcgaggccagggccgtggacataggattaaccacaataataatacaatgaagtacac

SEQ ID NO: 960 - DNA, 241 bp, synthetic construct
  misc_feature 1..241: note = Description of artificial sequence: synthetic polynucleotide sequence
  source 1..241: mol_type = other DNA
atgcaaaatgaaaacttaataatgaagaactactgattttttccagggagtatcaagcacttccttgtaaattcttacaaggcatgaattatttcctagaaatgatttaggctcttttggaaaagtgcattgattcttttaacatcataattccagttacggtaaaacctccattatctgattttctgtgaattgcaaagctattattaactggtacattttatattttaccagtacagtg

SEQ ID NO: 961 - DNA, 239 bp, synthetic construct
  misc_feature 1..239: note = Description of artificial sequence: synthetic polynucleotide sequence
  source 1..239: mol_type = other DNA
acagctgatatttataatggtgaccccaaagttctgtaaaatgccgaattacccactcaggaatcaaagaaagattaaattgtgttaaatagagtttttcatgttaagtgtcttattttattcagatcttgttttagaaagtccaagtgtacatccaccataattttcgagggcagtaccaacttaaaatgttttatcttttcttggctttgtaaacaaaaccttgtaaaaaaaaattt

SEQ ID NO: 962 - DNA, 479 bp, synthetic construct
  misc_feature 1..479: note = Description of artificial sequence: synthetic polynucleotide sequence
  source 1..479: mol_type = other DNA
tttttttcaatactttgggttcaaactacagatcattcgatctcaaacctgacaggtaaacaaatttttttttcagagtaagtattgcagacatgaaagatcataaatgtgttcaccaaagtgagtgtgagacagatcaccccaaacactctccactatttctctatgatcttagcccagctgtgtgtgttgtgagtcatgcctgggtctgacaccagcattcagaggctggcatagcttagcatccacatcataaagggctcagatcgatggctctccttgtcaagctctgcagccctctctcaggctttgtgagatgtggtttgcatcattttcctttaaggaaatgttatgcagaaacataaatgcagtatacaacgaggaggctttcaccaagaaattaaaagggtacagatgtctaggaatgcaggggttaagacaaaaatgtactgcagggaaagaaatgtgagcagaatgcc

SEQ ID NO: 963 - DNA, 480 bp, synthetic construct
  misc_feature 1..480: note = Description of artificial sequence: synthetic polynucleotide sequence
  source 1..480: mol_type = other DNA
cctcttttcgcctgcttctgccttgcatccagcccttcccggggagtgtgatgtgaactgccatccaaggtggctgtggtacaggggcagggtctgggggctgcttctgcagcttcagcgcagaaaacccagagctcagtcccagcaaaagcctaaaggagaaggaaacagaggccctaacacaacagaaaatgatgcaccccactttcctgtggttcatcagttcacatacttcccaggagaagtcaaatcacgccccagaataggatacctacttaggacttagtgatgttttatagtcatgtcgaagaaccttcacatccatggcctcatttgatctcacagcaagatgggcatgattaaaaaaaagaagttactcccactttccagatgagaaaacaaattcaaagacagtgagtgccttagctgagtcctatccaagcaaggcagggggcaaagccaggactaaaacacaaggtt

SEQ ID NO: 964 - DNA, 480 bp, synthetic construct
  misc_feature 1..480: note = Description of artificial sequence: synthetic polynucleotide sequence
  source 1..480: mol_type = other DNA
ctaattccttctccatgatttcctgatgcccatcataccctaatagaataggatcaccctgcaaggcaactggtccacatggagagtcctcttggaggacaccgacccgtggtgccacctctgatttgcaagttggtgcattagacaagccctggaatgacagccagaagatctctattctgatcctggccctccgtctacttgggccactttgatcaagccatttagccccgttcccttcaggtggctcagctggaagtaagaatgataatgcccatgcagctgactcacctggtgactgtgaaggccaaatgagatgatgtgtttgagagcactttgcaaactgtggagtattgccagccatttctcctaatttggctcagggcagaaagacatccaggtgaagagcttgatgtgtgtgatgacttaggcttggggatatttgtgaacaggacacaacaaataaattcgtttgacggg

SEQ ID NO: 965 - DNA, 241 bp, synthetic construct
  misc_feature 1..241: note = Description of artificial sequence: synthetic polynucleotide sequence
  source 1..241: mol_type = other DNA
cagagggacagtatgctgggtatagtagaaactcttggaacctgcagttattgaagggtttaaaactcaaaaatgatacagaaggcagttctattacagtttctgcttttttgctgttcaacacctctgaagatggtgcgtttaatccttcctgggatggcaggttatagatgacttcatgctgaaagtgacccgtaaggaatatccgtatattttgaagtgtatgtggttcaccaggcag

SEQ ID NO: 966 - DNA, 240 bp, synthetic construct
  misc_feature 1..240: note = Description of artificial sequence: synthetic polynucleotide sequence
  source 1..240: mol_type = other DNA
aaaacagtctgccaagtctctcatcccaggcagaaggggtggcacatgcgaaggccagagaatgcagtgcctctgagaactgtcagatgtcagtgtggctggagccaggtctgctagagggtgaggttggaagttaaccaggagtttaggaggccctgggaagcctctgaaaatatttaagcaaaaacagttagctttatgtttttgttgttgttgttgtttgagacggagtctcgctgt

SEQ ID NO: 967 - DNA, 360 bp, synthetic construct
  misc_feature 1..360: note = Description of artificial sequence: synthetic polynucleotide sequence
  source 1..360: mol_type = other DNA
aggtgtgagccactgcgcccggccagctttatgtttttaaaagatcattgcctcgttcttggttctcagctctctgatccttttagtttttattggatagaggagagaccttaatgtatacagagactaaggaacttggaattggaaatctgcctggctccctttccctcaacgtgcctgcagtcagccatctttctccagctaagccaaaggatggtgggggcaccacacaacagagagctgagttagaaagggtgggagggaggtggctgaagggtccccactgcagttgacaatttgaaataaactcccactttccttcaatattttcctatagcaaatggaaactttgaccagata

SEQ ID NO: 968 - DNA, 480 bp, synthetic construct
  misc_feature 1..480: note = Description of artificial sequence: synthetic polynucleotide sequence
  source 1..480: mol_type = other DNA
ccagcttctttccatccttccattagactcacagcccagttaggatgttcacagtcccaagccagggatagcacatgccattaccatagtgggctggatagggggcaggaagcaatgctttccagcccttagaagcctctggtgatgtgctgtgaacatggtgagggaacccgaactttagagtcaaacaggctggtctgcaaaccccggttccagcactcactggactcaggatcttcccaagttagttaactcctctgaccatgtctgcattttctcatctggaaaatgggaacagtaatatccaccctccagagctgttatgaagatgaaattgaaagtgtctccaacgcaccaggtatatagtataatctcaatttatgcttttgcccttagatgccagaagttaatattctttcaatacttattctcgtagaagcaaaagagatcctgtttgtgtgatgttcctacagcctctgc

SEQ ID NO: 969 - DNA, 480 bp, synthetic construct
  misc_feature 1..480: note = Description of artificial sequence: synthetic polynucleotide sequence
  source 1..480: mol_type = other DNA
tgtactgtattatgaaagctcaagaaataggagttaatgatgaggcacagcaggaagaaaaatgtctctaagatgccaaacagggaaaatttaggaagaaataagaaccaaaaaataaatcagttgatcagggtaaaaaatgtcttatgctctgaacttataactctatggagtaatttccactaatgatctcagtgtctacttaactaatcatgtacttttctagccagaaagacagtacttgtagggtacgttccattttaatgcacaaatcattgttgcttttcaaaaagtcatctttttttccctggccacacacagcaccccgaggcctggccagcccccatgccagctcaagagcatgaactcttaccggaatgggttctgtggggagtacaaagtcaaacataagtaggcttgcattcagagctcactgcctagcgggaaaaaagacatatgcactcataactctaatttaac

SEQ ID NO: 970 - DNA, 361 bp, synthetic construct
  misc_feature 1..361: note = Description of artificial sequence: synthetic polynucleotide sequence
  source 1..361: mol_type = other DNA
acggcgtcctagaaattccatatccatcttcaaagttctctggaagcaaaaagacaggaggaaagacatttttagaaggaggcttcctggaaggagtgacttcagtttcaggccttaaaggagatgtgagtttccacatgcaaggagggaggaaaagcatgttgcagacagacgaagcaagtgtgtgagcaaaggcctgcggggtgacagggaggggtgttgggaggtgtgtatctggatgaaggcaggtatggaaagtgctgggaaaaaaggtctgggaaagggccttgggggccaggtgataaggaagttgaatgcctctttgaagagtggggttttattttatgtgcctttggtgggg

SEQ ID NO: 971 - DNA, 360 bp, synthetic construct
  misc_feature 1..360: note = Description of artificial sequence: synthetic polynucleotide sequence
  source 1..360: mol_type = other DNA
agcctggccaacatggcgaaaccccatctctactaaaaaatacataagtaacaaaaattagctgagcgtggtgatgcatgcgtgtaatcccagctatgcaggaagttgaggcacaacaatcgcttgaacctgggaggcggaggttgcaatggcctgggattgtgccactgcaccccagcctgggcgacagagcgagagagactctgtctcaaaaaaaaaaaaaaaaaagcaatgggaatggttcttaaggaagatttctctgggcacactgtatgttctcactgaatatttggtgtggtttgggttttataccagttacgatatggggcttggtatctctgagcctaaaatctgtgcttt

SEQ ID NO: 972 - DNA, 478 bp, synthetic construct
  misc_feature 1..478: note = Description of artificial sequence: synthetic polynucleotide sequence
  source 1..478: mol_type = other DNA
ccaaggacagtagaaatgctagtgttcactttgctcagtactcttccctccacttggcactcatgctgcttctcaagccttggggtgtccctggttctggagtccctcctacccctgcagcccttttctaagctatagtctcacccctcctctgcaggctcccaggcagcctcacctcctcctgcagagggatcagctgtcaccctgctcctccctcctggccctcagcctaccctacccacatgcattcaccatcttaccagtggaacaggcgtccctctcctgtatacagaggtcccttcccctgagctcttctgcctcagcctccccagtgggcttctcccctccttcacagtcagcctctttctcatttgcacctagttccattccatcttcaaagaagcccacttggattgcacatctctcttcactaccacaaatctggttcctcacagccaagttctggaaagagttctcc

SEQ ID NO: 973 - DNA, 479 bp, synthetic construct
  misc_feature 1..479: note = Description of artificial sequence: synthetic polynucleotide sequence
  source 1..479: mol_type = other DNA
acatggtgtcctcctcctcacctcccattagcgcctcaaccctccgtgatctggtttctacgcctgctgcccctctgccctggctgcagtccccagatgccgaatccatctgccatctgctgcccgaaactctcctggcttgcaagataccactgtcctctgacttgtccccggtcttgtcccctgctgttccctcctttaagaatacaccttttctaaattgcctgctgcctaaatgttttcctctggaaaactcacctactccagcggcttcaacgatcatcagtgcgatggggacttccaaatattttttatctctagcctgggcctttctcttaaataacagatgcatgtgtacaactgcctactgggcctctttacctagatgttgtacagttacctcacattcaacaaagctgaatatatcccccgccaatccatcctctgtgggatgagatgggcgggcccctctattcatc

SEQ ID NO: 974 - DNA, 479 bp, synthetic construct
  misc_feature 1..479: note = Description of artificial sequence: synthetic polynucleotide sequence
  source 1..479: mol_type = other DNA
tagtttcaggaatcaggagcttggattttgtcattgactgcttcctccacattgaattaatctcttaagttccatcaattctaccccatggtatcttcagcccatcctttctccatcccttctgctttagttcaggctaacaatatctgtcatctccatttctgcaacagcctctgactggccgccttgtaccagtcttgccctgttctaattcattctctactctgcagctggagtgatcctttgaaaacaatatccgattatgttacgcccttgtttaaaattcttcagtgactccttgtagccttaggataaagcctgaactccttagtacagcagacaaggccttccaaggccttcctaataatagctaacacttatgaagttcgcaatccataccccacactgttctaaggtccttacacatatgtcaacatacttaatgctcataattcctgacgtaggtcctgttactatcc

SEQ ID NO: 975 - DNA, 121 bp, synthetic construct
  misc_feature 1..121: note = Description of artificial sequence: synthetic polynucleotide sequence
  source 1..121: mol_type = other DNA
gagttttacagtggaggaaatcgaggcacagaaaggtaaggcaccttgcacaaggtcacacagctaggaagtgggagaaccaagattcaaacccaggaaacctgactccaggcccacactc

SEQ ID NO: 976 - DNA, 358 bp, synthetic construct
  misc_feature 1..358: note = Description of artificial sequence: synthetic polynucleotide sequence
  source 1..358: mol_type = other DNA
cttagcaccatgctgcactgtctccatcatgtgccgtagcttctcatccattcagaaatattatattgagtactgaaaatgggctagaagctgcttgagacactggggatatagcaggaatccaaacaaaggtccgttcacatgctagtgaagaaaatgagtaagaaacagcatgattagtaaaattattaggtagattagggatgaatgctaagagaaaacaaaaataagcaagaaagaagaccgggggagtctgagaacagatatgcgatgttagaaggagtgtccagggaggacttgaaggaagtgaggatgtctaggagaagaatatcagctgaaggaacagcaagtccaaagg

SEQ ID NO: 977 - DNA, 480 bp, synthetic construct
  misc_feature 1..480: note = Description of artificial sequence: synthetic polynucleotide sequence
  source 1..480: mol_type = other DNA
ccctgaggtgggaatagttcctggtaggtctgaggaacagcagagaggtcagcgtggctggagcagaatgaaggagggaaaggatgatggcaggaaaggatggtgggagctgggtacagacaggtcaggtcatatagggcccagaagatcattgtaaagaccttggcatgaactgtgagtgagagataggaagccactgggggattctgggcagagtgacatgatgaaacttacaaacagaggagtgatgtgatttgaatcaatctctggcaggtctgttgaggatagatgcagggaaggaacagtggaagctggcagaccagtcagggaccagtaacaatgatccaggcaagagaggatggtggctgggactaatgtagtagcagcagaggtggcggaagtgggcagagctggatacatttggaaggcagagccaataacacttaccaatggaccagaagggggtgtaaaagaagaaac

SEQ ID NO: 978 - DNA, 166 bp, synthetic construct
  misc_feature 1..166: note = Description of artificial sequence: synthetic polynucleotide sequence
  source 1..166: mol_type = other DNA
ggcttgcagccaatttactggagcagggatgacgtagcccagtggctcaagtgggctgaaaatgagttttctttaaggccaattgacagcaacacgtttgaaatgaatggcaaagctctcctgctgctgaccaaagaggactttcgctatcgatctcctcattcag

SEQ ID NO: 979 - DNA, 136 bp, synthetic construct
  misc_feature 1..136: note = Description of artificial sequence: synthetic polynucleotide sequence
  source 1..136: mol_type = other DNA
ggtgatgtgctctatgaactccttcagcatattctgaagcagaggaaacctcggattcttttttcaccattcttccaccctggaaactctatacacacacagccggaggtcatactgcatcagaaccatgaagaag

SEQ ID NO: 980 - DNA, 213 bp, synthetic construct
  misc_feature 1..213: note = Description of artificial sequence: synthetic polynucleotide sequence
  source 1..213: mol_type = other DNA
gataactgtgtccagaggacccccaggccatccgtggataatgtgcaccataaccctcccaccattgaactgttgcaccgctccaggtcacctatcacgacaaatcaccggccttctcctgaccccgagcagcggcccctccggtcccccctggacaacatgatccgccgcctctccccggctgagagagctcagggacccaggccgcaccag

SEQ ID NO: 981 - DNA, 334 bp, synthetic construct
  misc_feature 1..334: note = Description of artificial sequence: synthetic polynucleotide sequence
  source 1..334: mol_type = other DNA
gagaacaaccaccaggagtcctaccctctgtcagtgtctcccatggagaataatcactgcccagcgtcctccgagtcccacccgaagccatccagcccccggcaggagagcacacgcgtgatccagctgatgcccagccccatcatgcaccctctgatcctgaacccccggcactccgtggatttcaaacagtccaggctctccgaggacgggctgcatagggaagggaagcccatcaacctctctcatcgggaagacctggcttacatgaaccacatcatggtctctgtctccccgcctgaagagcacgccatgcccattgggagaatagcag

SEQ ID NO: 982 - DNA, 144 bp, synthetic construct
  misc_feature 1..144: note = Description of artificial sequence: synthetic polynucleotide sequence
  source 1..144: mol_type = other DNA
gactgtagactgctttgggattacgtctatcagttgctttctgacagccggtacgaaaacttcatccgatgggaggacaaagaatccaaaatattccggatagtggatcccaacggactggctcgactgtggggaaaccataag

SEQ ID NO: 983 - DNA, 121 bp, synthetic construct
  misc_feature 1..121: note = Description of artificial sequence: synthetic polynucleotide sequence
  source 1..121: mol_type = other DNA
gaacaaacagaacagaacaaacatgacctatgagaaaatgtccagagccctgcgccactactacaaactaaacattatcaggaaggagccaggacaaaggcttttgttcaggtagcacttc

SEQ ID NO: 984 - DNA, 121 bp, synthetic construct
  misc_feature 1..121: note = Description of artificial sequence: synthetic polynucleotide sequence
  source 1..121: mol_type = other DNA
ttccaaaggtttatgaaaaccccagatgaaatcatgagtggccgaacagaccgtctggagcacctagagtcccaggagctggatgaacaaatataccaagaagatgaatgctgaaggaacc

SEQ ID NO: 985 - DNA, 121 bp, synthetic construct
  misc_feature 1..121: note = Description of artificial sequence: synthetic polynucleotide sequence
  source 1..121: mol_type = other DNA
agtaatgcttctgctgcagttggatttctgtgcctccaatgtaattgatcattttatctgtgactcttctccaatgctgcagctctcttgcacaaacactcactttctagaactcatggca

SEQ ID NO: 986 - DNA, 121 bp, synthetic construct
  misc_feature 1..121: note = Description of artificial sequence: synthetic polynucleotide sequence
  source 1..121: mol_type = other DNA
tagctgtggtaacactgatggtcaccttgacattagttattctctcctacacaaacatcatccggacaattctgaaaattccttctatgagtcaaaggaaaaaagccttttccacttgctc

SEQ ID NO: 987 - DNA, 121 bp, synthetic construct
  misc_feature 1..121: note = Description of artificial sequence: synthetic polynucleotide sequence
  source 1..121: mol_type = other DNA
ttagagatcctcccacacaggagggcagagggggattagtgctggttcaggaggaagcaactgccatctctgcatggtgccccctcctcactgcacagtcacctccaagcaatgactcccc

SEQ ID NO: 988 - DNA, 121 bp, synthetic construct
  misc_feature 1..121: note = Description of artificial sequence: synthetic polynucleotide sequence
  source 1..121: mol_type = other DNA
tgtagcgtagcttgctgttgtcaccacctgcagggccctggacgaccttgacagccacactgttctccttgaacctcactgagaacctggagagggaacagaaaaccaagtctagtgccca

SEQ ID NO: 989 - DNA, 191 bp, synthetic construct
  misc_feature 1..191: note = Description of artificial sequence: synthetic polynucleotide sequence
  source 1..191: mol_type = other DNA
atcaccaactggggttggcccttaggtccatgtgggacattgagatcccagattgcccatagtgggagggctgcaggaggggctgtgcccccaaggaccctccccccgactccccttgcccctccaggagaagcttagtgaggtcctgttcagtgggaggcagcagaggagggaatatgtcttcaccaatc

SEQ ID NO: 990 - DNA, 121 bp, synthetic construct
  misc_feature 1..121: note = Description of artificial sequence: synthetic polynucleotide sequence
  source 1..121: mol_type = other DNA
tgccctgaggaaacgctgtcactggctggctcaggcagctgtcttccaccatggtcacatctgagcagagcagggggtcagggctggacacagcatgctcctgaggctggcacggcagcag

SEQ ID NO: 991 - DNA, 121 bp, synthetic construct
  misc_feature 1..121: note = Description of artificial sequence: synthetic polynucleotide sequence
  source 1..121: mol_type = other DNA
tggggtcaggaggggctttgtcactcactgggggtgaggctggtcaaagggcaggctcatctggcccaggctggggggcatctgcaggtgaggcctggaagtagggagagcacagttagag

SEQ ID NO: 992 - DNA, 121 bp, synthetic construct
  misc_feature 1..121: note = Description of artificial sequence: synthetic polynucleotide sequence
  source 1..121: mol_type = other DNA
ggtttttcacttactcctggaaggctgacaacacgttgactgattcttctggggagaggccttgatacggggggatggagtgagagtgtggtgggtacacctggggcctggggaaagaaaa

SEQ ID NO: 993 - DNA, 121 bp, synthetic construct
  misc_feature 1..121: note = Description of artificial sequence: synthetic polynucleotide sequence
  source 1..121: mol_type = other DNA
cttacaccatatctgggccaagctgcatgctcatggaggaatcaggggccattccaaggtcataagaaggcaccatggtaggcatctggagctctggggtaggaagtggttggtccctgga

SEQ ID NO: 994 - DNA, 121 bp, synthetic construct
  misc_feature 1..121: note = Description of artificial sequence: synthetic polynucleotide sequence
  source 1..121: mol_type = other DNA
ctacccactgtccataccaccacactcacctttccacggtcatcttgatggtagctgggacataacccctgccatccttacccatctgttcagctgttgtgagaaggaaaagacagccatg

SEQ ID NO: 995 - DNA, 148 bp, synthetic construct
  misc_feature 1..148: note = Description of artificial sequence: synthetic polynucleotide sequence
  source 1..148: mol_type = other DNA
cgcttgtagtggctccggaaagcctcatccttgggcttcttgggatagagatttttgagctgagcaagatcccggattcggtcccccagtgagcgaatggacaggtctttggcagagaatggctggatgttctctatctgtggagagc

SEQ ID NO: 996 - DNA, 138 bp, synthetic construct
  misc_feature 1..138: note = Description of artificial sequence: synthetic polynucleotide sequence
  source 1..138: mol_type = other DNA
ccatcctggccccggatgacatgggcaatggtgatgcccccaatctctgagtcgctgaagcggaggagaaaggttccgtcgggctcattgagaagaaggctagtaacgtactgtttgctgatgaagccaatgatcagc

SEQ ID NO: 997 - DNA, 121 bp, synthetic construct
  misc_feature 1..121: note = Description of artificial sequence: synthetic polynucleotide sequence
  source 1..121: mol_type = other DNA
ggtggggactcaccggtcagaccagtagctccggagacagcgtttggtgaggtccaggacaccatcaaaccactgccaaaaggtgaagccacggcccagcaggatctcctagggggagagg

SEQ ID NO: 998 - DNA, 208 bp, synthetic construct
  misc_feature 1..208: note = Description of artificial sequence: synthetic polynucleotide sequence
  source 1..208: mol_type = other DNA
ccttgttgaactgcgaccaggacacagaacggtgctggaaggcctccatactgaggctgttgtcattgaagatcttctgggccaggaagaggaagtgctctgggagcagcccccggttggtccccacctcagccatgaacttcaggttcagagtttcacacatcttctcccagggcacccgctcagccaccacaaagggcacgcggtc

SEQ ID NO: 999 - DNA, 121 bp, synthetic construct
  misc_feature 1..121: note = Description of artificial sequence: synthetic polynucleotide sequence
  source 1..121: mol_type = other DNA
aggactttcctcaccatctcagagaaggcattgtcccacaggatagtggctttggcattgttgtcttggttgccatggacgatgaccaccaggggcagagacagggcctgaagagggtgag

SEQ ID NO: 1000 - DNA, 121 bp, synthetic construct
  misc_feature 1..121: note = Description of artificial sequence: synthetic polynucleotide sequence
  source 1..121: mol_type = other DNA
tggagctggatggggagtttgccggggccaagtgtgaagctggcagagaagagcacagcgcacttctcctctgtgacagactcagtgcccttccgctcacaccgcttgatcttcttgagaa

SEQ ID NO: 1001 - DNA, 121 bp, synthetic construct
  misc_feature 1..121: note = Description of artificial sequence: synthetic polynucleotide sequence
  source 1..121: mol_type = other DNA
accccaaagcccctcaccaggttcttgaacagggcagagcagcagttcccaggaatgctgttctccaagggcacagtgttgttgatgatttctccagtgctttctctgccaggggaggtca

SEQ ID NO: 1002 - DNA, 190 bp, synthetic construct
  misc_feature 1..190: note = Description of artificial sequence: synthetic polynucleotide sequence
  source 1..190: mol_type = other DNA
cgctccagccccaggaccctgaggcacactcagctcccgcgcctgcttctctgtcaccatgtcggccctgaccagcggaggcttggctggggcccccaggaacctcaagcccaacaggaatcgaactccagcctggaacttggtctgagtcttcagtacctgggggggctgcttctccaccaggaagcaa

SEQ ID NO: 1003 - DNA, 133 bp, synthetic construct
  misc_feature 1..133: note = Description of artificial sequence: synthetic polynucleotide sequence
  source 1..133: mol_type = other DNA
cctggtgacgagggttctcaggacttcatccagccggccagtcagcgatgcccgggtcttgggctcaagctccccaccagccgcccctacctcctgctgtagctgggaataaatgtccaccaggctttcacac

SEQ ID NO: 1004 - DNA, 150 bp, synthetic construct
  misc_feature 1..150: note = Description of artificial sequence: synthetic polynucleotide sequence
  source 1..150: mol_type = other DNA
cctctcctggagtggggccaggctctcctcaaacggtgcgccattccctgccagctgctgctgccgtttccaaatctggatcctcttcagcactagggctttggctgcctctagctctccagtggtctcctgcagtagcatggccagggc

SEQ ID NO: 1005 - DNA, 121 bp, synthetic construct
  misc_feature 1..121: note = Description of artificial sequence: synthetic polynucleotide sequence
  source 1..121: mol_type = other DNA
gaccaaggtctccacctgtcagcccattactcacctcacttggcccagtcccattagcaggagtttctatcaagctgtgcagagacactgagggttgggggcagaaatcaagggtgcagac

SEQ ID NO: 1006 - DNA, 140 bp, synthetic construct
  misc_feature 1..140: note = Description of artificial sequence: synthetic polynucleotide sequence
  source 1..140: mol_type = other DNA
ccttggccagcctcagcccccttctgcagggcttctcggagaaggtggatctcccctactcggtgctgcagcctccgcaagcctgtcttaaacttgagttcttcctgcttccagtggaaaggcattggcaagtggcggaa

SEQ ID NO: 1007 - DNA, 121 bp, synthetic construct
  misc_feature 1..121: note = Description of artificial sequence: synthetic polynucleotide sequence
  source 1..121: mol_type = other DNA
aggtggaatatcacaatacctgttccataacagcttttttctctccttgaagtatttgtctgaaagtggccaccagcttcagggggtccctctgatatatgctctacagaaatgagggtgg

SEQ ID NO: 1008 - DNA, 140 bp, synthetic construct
  misc_feature 1..140: note = Description of artificial sequence: synthetic polynucleotide sequence
  source 1..140: mol_type = other DNA
cctcaagggtgctgatgtgttgcaagatggtgctcccctccccctgctctcccaccgaggcctgaaggtgctggacagtgtctgaaagtagggcactagccaagttgcagcagaaggcgtcggagccgaccaggaactcc

SEQ ID NO: 1009 - DNA, 121 bp, synthetic construct
  misc_feature 1..121: note = Description of artificial sequence: synthetic polynucleotide sequence
  source 1..121: mol_type = other DNA
caccagggctggctctccagccagtcacccagaagatgccgcaggtgttggggaaagtcgacatagagccgctgcactttttctgggggcatcttggagaccagaccccacagagacatga

SEQ ID NO: 1010 - DNA, 121 bp, synthetic construct
  misc_feature 1..121: note = Description of artificial sequence: synthetic polynucleotide sequence
  source 1..121: mol_type = other DNA
gtgggggcctgccgattggattctttcgcgtgtgtgtagaagcggccgccgccgccgccgcggcggagacgacaacaacttgctggttttcaggttgggttaacggcatggagaacagtca

SEQ ID NO: 1011 - DNA, 121 bp, synthetic construct
  misc_feature 1..121: note = Description of artificial sequence: synthetic polynucleotide sequence
  source 1..121: mol_type = other DNA
caccaccaccaccagcagcccccgccgcagcccggcccttcgggcgagaggaggaaccaccattggagaagttacaagttgatgattgacccggctctgaaaaaggggcatcataaactgt

SEQ ID NO: 1012 - DNA, 121 bp, synthetic construct
  misc_feature 1..121: note = Description of artificial sequence: synthetic polynucleotide sequence
  source 1..121: mol_type = other DNA
tttggatgttggttcagagaaaatggatgtatcttgaaagtatttttattggtggagatataagatcacaacttccggaagaggcaaaaaagtttgacaacatcgataaagtatttaaaag

SEQ ID NO: 1013 - DNA, 121 bp, synthetic construct
  misc_feature 1..121: note = Description of artificial sequence: synthetic polynucleotide sequence
  source 1..121: mol_type = other DNA
ctggctaatggcccagctgtgggttcttctgcagcagccactccagggtctccaggaggtacgacatgccgtagtgctgggcaatgttccggaatattccgatctgttccatgaagacctg

SEQ ID NO: 1014 - DNA, 121 bp, synthetic construct
  misc_feature 1..121: note = Description of artificial sequence: synthetic polynucleotide sequence
  source 1..121: mol_type = other DNA
atgagggagagcccacctgggtgtggatggtgagggcgaagtctcccgcgcagctgcagtacacaggcatgctggtctccttcaccccgcggcacttcaggcagacctgaaagggagcagc

SEQ ID NO: 1015 - DNA, 121 bp, synthetic construct
  misc_feature 1..121: note = Description of artificial sequence: synthetic polynucleotide sequence
  source 1..121: mol_type = other DNA
ggtcctgcagggtgaaggccatcagcttcttctgtagaacttccaccagcgtcatctcgatggcagaggagtcgtagggcgcctgacagttggagcagagccactgaggcaggaccgcccc

SEQ ID NO: 1016 - DNA, 202 bp, synthetic construct
  misc_feature 1..202: note = Description of artificial sequence: synthetic polynucleotide sequence
  source 1..202: mol_type = other DNA
cctctgagaaggaagagtctttacacaggtccaggtcgcggcagaagttacagctgcggcagatgacctcaggaagcacgtaggagcggcaggggtctcggaactgggcctcctcggagaactcgccgacatccaccaggcgaagcaggtctcggttcagcttattcacctggtttgtgatgttggtgtccagggacagcac

SEQ ID NO: 1017 - DNA, 195 bp, synthetic construct
  misc_feature 1..195: note = Description of artificial sequence: synthetic polynucleotide sequence
  source 1..195: mol_type = other DNA
ccttgcacacgtatttgatgaactccagggcagggttattgagcagcaagtgggaaccggggaggacaggaaacatctctgagagctcagtggagttccgagagcctgtgactttcttctgaatcttctgagtgatggtgaagaagctctgagtgagctcatttgcgacataatcctgagagaaggtgatcattc

SEQ ID NO: 1018 - DNA, 133 bp, synthetic construct
  misc_feature 1..133: note = Description of artificial sequence: synthetic polynucleotide sequence
  source 1..133: mol_type = other DNA
ccgggaagggctccgaccgccccctcggcctcctgggagagctggctggcccccctcctcctcacgggggtgctccctggagcactgcgcctcagcccgtccttcatgcagtggtacacggccacgatgtacg

SEQ ID NO: 1019 - DNA, 194 bp, synthetic construct
  misc_feature 1..194: note = Description of artificial sequence: synthetic polynucleotide sequence
  source 1..194: mol_type = other DNA
cctgaaacaatcatgaggaagtagttctggcaggaggctgcctgtggcaaaaactgcaaaatgttccagttgttttccagtaaatcctccacgttggattcctccgcctcttcctcctcctccccatctctttcctcctcatcgtcctcattttcctgctcatcctctgctccccctgctttctgggagtcttg

SEQ ID NO: 1020 - DNA, 134 bp, synthetic construct
  misc_feature 1..134: note = Description of artificial sequence: synthetic polynucleotide sequence
  source 1..134: mol_type = other DNA
ccagtccacagtgaatacgagatgaaacttttcctttgattccgccatagttagatggatccatccagagaagaaattcccagcatcgagagaaagaaattgtcagagaatggaaggtctcctttgaatggatg

SEQ ID NO: 1021 - DNA, 121 bp, synthetic construct
  misc_feature 1..121: note = Description of artificial sequence: synthetic polynucleotide sequence
  source 1..121: mol_type = other DNA
gctggtgatgtactccacgtaagcgatggcatcttccacacggcgcttctttgtacagaggatgatgcggttgaagttggcgtagatgactgatgaccccaggcgcttgaactcagcgatg

SEQ ID NO: 1022 - DNA, 175 bp, synthetic construct
  misc_feature 1..175: note = Description of artificial sequence: synthetic polynucleotide sequence
  source 1..175: mol_type = other DNA
ctgcaggaagagcttcttcatcatgttgtggagtgtgcggtgcagggcagggtcatgaagcagagaggatggcgaccgaagccagcggtagaagtgcatcacctggttgtctgcatagatgttgtggtactgggtgatctccttcacccagcccacgaccatgctcttcaggatc

SEQ ID NO: 1023 - DNA, 206 bp, synthetic construct
  misc_feature 1..206: note = Description of artificial sequence: synthetic polynucleotide sequence
  source 1..206: mol_type = other DNA
cctgaaggtgttagagcacagggctgtctcatcgtagctggccggggcactggcagcctgaccacccgtgatcatgtcctccagggaggcctgctggatcacgtcgaagctgatccccatgctgtcggccccctccatgtcgttgacatggtgagactggagaatggtgttgacggccaggttctgaaggtccagctccacacaca

SEQ ID NO: 1024 - DNA, 222 bp, synthetic construct
  misc_feature 1..222: note = Description of artificial sequence: synthetic polynucleotide sequence
  source 1..222: mol_type = other DNA
cctgtggagtaacagcctgaactgttgatctcaacagtggcttggtcatcgaactccatgacaagacagttgtcatcagcctcctttccacccaggtcagggcgggctgtaggggacagccagagcaggtggttgtggcgctggaggtggcgggcaaagaagaggtcggagccgaatgtggagatgtcctctggtaggttcccaatgggaatgtgaaagtac

SEQ ID NO: 1025 - DNA, 225 bp, synthetic construct
  misc_feature 1..225: note = Description of artificial sequence: synthetic polynucleotide sequence
  source 1..225: mol_type = other DNA
cctgctcatctcgaaggcctgcgacaggcaggtgtccaggttgaggtagtgacggatcatgcgccgggctccatggcgctgccagtccaggaccccatagttgatcttgtcagccacacagataggcaccagtgggaattcctccaagacaggaatttcactggccagcctcttcagctcccagctggactgaacagcgatgagtgtgggcccccggcgctcctc

SEQ ID NO: 1026 - DNA, 178 bp, synthetic construct
  misc_feature 1..178: note = Description of artificial sequence: synthetic polynucleotide sequence
  source 1..178: mol_type = other DNA
ccttgtaggcgagcaggaatcgctggatggctctgcagatggtcttcaggtcagtttctgcccgaacttcgaaggtgtgtttggggggtggcaggagctcagggcccaccttctccaggaggaggccgtgctctgctgagtacagggcgccaaggctgggcatctggttgctgcgcac

SEQ ID NO: 1027 - DNA, 121 bp, synthetic construct
  misc_feature 1..121: note = Description of artificial sequence: synthetic polynucleotide sequence
  source 1..121: mol_type = other DNA
gactcacagtgtccagcacaaagacggatgccctgcgctgtgaggggatgaagatcccgaagagcgctttgtgggcctgtgcgtggtggtacaggtagatatggcggatactccctggaga

SEQ ID NO: 1028 - DNA, 155 bp, synthetic construct
  misc_feature 1..155: note = Description of artificial sequence: synthetic polynucleotide sequence
  source 1..155: mol_type = other DNA
cctggttccaggtagctgaactgggccagagagcgcatctccaggtgctcaagagcaaaggtctctgcttcccagcctgaaaggtgcctcaccagctgtttattgaccacacacacacagcccaggtgcaccagggcccggaacagtaacggaac

SEQ ID NO: 1029 - DNA, 142 bp, synthetic construct
  misc_feature 1..142: note = Description of artificial sequence: synthetic polynucleotide sequence
  source 1..142: mol_type = other DNA
cctgagtctcatatacgccctcgatgtctggcgctgacagctcagcgttgatctcgttgatgtgttcctggtacatgtcctctggcactgaatactcatagagattgtagaccatgttggagcgaggaaggacccgatttac

SEQ ID NO: 1030 - DNA, 145 bp, synthetic construct
  misc_feature 1..145: note = Description of artificial sequence: synthetic polynucleotide sequence
  source 1..145: mol_type = other DNA
ccttgcgatacgaagcaccctcctccgctttagcgactcgctggttcacgtagaacacacgggggatgctcagcctgatgcagtgcaagtcactgccaacgagcgcccacagcctgaacaggccggcctggctggtctcgctgat

SEQ ID NO: 1031 - DNA, 211 bp, synthetic construct
  misc_feature 1..211: note = Description of artificial sequence: synthetic polynucleotide sequence
  source 1..211: mol_type = other DNA
cctgcacaatctgccacggaaggtccaggatgctgcgggcagttcttcgcaagaagctccccagccccgtggcaggaccatcccggatggccccgggcctgagcacaccctctgccgactccagacgctgcctcttcctgcgggcgaggcgctgccgggcctgcagctgccacttcttcttgtggaaccggagccagacaagccattcctc

SEQ ID NO: 1032 - DNA, 214 bp, synthetic construct
  misc_feature 1..214: note = Description of artificial sequence: synthetic polynucleotide sequence
  source 1..214: mol_type = other DNA
cctggctggttcccagggcgggaggctgccccaagatttcctgccagggcacagtcggcgtgaggtcctgggactcctcctggctctcccaaagaactcgcttcctcttcacagtgacaggggctgctgggtgaggcagctttacgaggccgaagtcctccatgtcaggagcacttggcctcggactgtcttctgaggcctcggccatcgtgac

SEQ ID NO: 1033 - DNA, 121 bp, synthetic construct
  misc_feature 1..121: note = Description of artificial sequence: synthetic polynucleotide sequence
  source 1..121: mol_type = other DNA
tgtctcctgccctccagggtgaagagctcactgatcttcttctgcttgtagacatcattcttctccagcagttttttgtgcagccagtcggggtgtttgacacgtggcactgggttcttta

SEQ ID NO: 1034 - DNA, 121 bp, synthetic construct
  misc_feature 1..121: note = Description of artificial sequence: synthetic polynucleotide sequence
  source 1..121: mol_type = other DNA
gccactgaccccgcccttacctgctgcagggccgcagggatggtgatgatcttctggatggcgcttcccagccgctcaatgtagtagtcccaatccagaatctgcatgtgcaggaaacggg

SEQ ID NO: 1035 - DNA, 121 bp, synthetic construct
  misc_feature 1..121: note = Description of artificial sequence: synthetic polynucleotide sequence
  source 1..121: mol_type = other DNA
ggcactcactgctcgaatatcaaagtcttgaagggaagagctcttgagccatttccggagaaagtgcttcctcaccgtgggctctgcttggaaaatggcaagtgggatggccctgggtaag

SEQ ID NO: 1036 - DNA, 216 bp, synthetic construct
  misc_feature 1..216: note = Description of artificial sequence: synthetic polynucleotide sequence
  source 1..216: mol_type = other DNA
cctctccgtgacaggggagccctcgggcttgcgggagatgatgtagcggcaactcagccctgcatccttgaccatctggtctcccaggaactcggccaggcgctttgctgtgctgatggacgtagacttctgctccccgtaatcttccagcttccgagacatggaacggttctcagagatgagctcgaatagctcagagtcaggcatgttggctgc

SEQ ID NO: 1037 - DNA, 197 bp, synthetic construct
  misc_feature 1..197: note = Description of artificial sequence: synthetic polynucleotide sequence
  source 1..197: mol_type = other DNA
ccttgctgtacagcacgtccagccagtagtcagccaccttggctacagagccatacacctcttccagcgtgctgcccttgaggaaggcctcaaacaccgaggattggaagatcttaatcagctgcagttccccgcggcgtttgacctcaaagcccttgagctcagccagagaaccgtcttcattgaacacagcatac

SEQ ID NO: 1038 - DNA, 159 bp, synthetic construct
  misc_feature 1..159: note = Description of artificial sequence: synthetic polynucleotide sequence
  source 1..159: mol_type = other DNA
cctcttcttcaatttcttgccttcttccttggaggctggaagaatcatggcaaggtagggcccatcaacctcaaaaaagatgctgttctctgagcgggtgacgtaggtgagtgaggacggctcagccagctcctggtactggtcattggtgaagccttc

SEQ ID NO: 1039 - DNA, 146 bp, synthetic construct
  misc_feature 1..146: note = Description of artificial sequence: synthetic polynucleotide sequence
  source 1..146: mol_type = other DNA
ccttgaccatgatgttcaacatggcgcctgggtaggagatggtcactttgggcttcttcacattggtcgtcttgaagacaaaattttctgggaagctgttgggcaggacgcaccatataccatctgtgtccagctctaagggcctc

SEQ ID NO: 1040 - DNA, 121 bp, synthetic construct
  misc_feature 1..121: note = Description of artificial sequence: synthetic polynucleotide sequence
  source 1..121: mol_type = other DNA
ccttctgcactcacccaatctgctcgatcagctcccgtgcctgggtgatgatgttggcccctgtgaagcagacgatgccagccatctccatggagtaccagcgagccctgagaggacacca

SEQ ID NO: 1041 - DNA, 150 bp, synthetic construct
  misc_feature 1..150: note = Description of artificial sequence: synthetic polynucleotide sequence
  source 1..150: mol_type = other DNA
ccccttgcgcatgacatagccatagaaggagttcaggatgcacttgtgggccagctgcagcgagtcatacagcacctccatgttcttgcagcgcttcacctcagccgcgtcgcccacctccacggccgccgagagcttctttttccacac

SEQ ID NO: 1042 - DNA, 147 bp, synthetic construct
  misc_feature 1..147: note = Description of artificial sequence: synthetic polynucleotide sequence
  source 1..147: mol_type = other DNA
ccttgtggagccctttgaactcgtaacgcctgtcccggaaggcacgcacggtgtccacgtagaaggagttttcccgctggcagatggtggtgagacgctcttccaccttggtgatgtggatcttcttgtaggctttccggcagtaat

SEQ ID NO: 1043 - DNA, 148 bp, synthetic construct
  misc_feature 1..148: note = Description of artificial sequence: synthetic polynucleotide sequence
  source 1..148: mol_type = other DNA
cccgccagccttctcttctcgtatttcgcctgttcctcgcgggacagttcatgaaaggcccgagctggcccctctgggaacaagggggggaacttctctgactccagctggtgctggatccgatggtattcgctgcgactggctggca

SEQ ID NO: 1044 - DNA, 121 bp, synthetic construct
  misc_feature 1..121: note = Description of artificial sequence: synthetic polynucleotide sequence
  source 1..121: mol_type = other DNA
gacactcactgaactcgcccctccactgccaggccatcttccgctggcagtttgctccaggcttattgaagtcacaggcagcacaggtggcttcgtccaccatggcagagggctgggaggg

SEQ ID NO: 1045 - DNA, 121 bp, synthetic construct
  misc_feature 1..121: note = Description of artificial sequence: synthetic polynucleotide sequence
  source 1..121: mol_type = other DNA
aggcggttggtcaggatgatgttggggtacatggcccccacgtccaggtggtagatgagtggacactcgatgcggctgggaacgtccttcagggaggcaagcttgctcttaatctcatcac

SEQ ID NO: 1046 - DNA, 121 bp, synthetic construct
  misc_feature 1..121: note = Description of artificial sequence: synthetic polynucleotide sequence
  source 1..121: mol_type = other DNA
tggttacctcttcaaagttggtgacttgctccacaggcactttctcctcttcctcaagggcgtggcgcaaggtcttctcaacccgctgcagcaggaagtcaaaggcggcaggattctagca

SEQ ID NO: 1047 - DNA, 214 bp, synthetic construct
  misc_feature 1..214: note = Description of artificial sequence: synthetic polynucleotide sequence
  source 1..214: mol_type = other DNA
ccatcctaaaccggcaagggatatcgctgcggaaaaccccagactcgagggcctccacgtggcccccgacgtaggtctcagagtccagcacgtgtccgtcgtccgtcagcttattgaactcctgctcttgcttgttggggaagatgatgttggcgtggaaggcctgcaccatcagcaaggcctcacacagagtgccagagcccttccgcagcac

SEQ ID NO: 1048 - DNA, 121 bp, synthetic construct
  misc_feature 1..121: note = Description of artificial sequence: synthetic polynucleotide sequence
  source 1..121: mol_type = other DNA
tcacctcgtcgggctccatgggaataatggtgcacagagcaaagatgaatgggtggacgtacttcatgtacaggtagtaagtggcgacagcatctgacacagaatacgtggccagagtctg

SEQ ID NO: 1049 - DNA, 134 bp, synthetic construct
  misc_feature 1..134: note = Description of artificial sequence: synthetic polynucleotide sequence
  source 1..134: mol_type = other DNA
cctggggctgctccgtggccatccggcacatgtcctccgggtctagctccacgggatcatagcctagcttggccttggcggccgccttgagattatgactgcccacaggaaggtaactgtccctcttcacccac

SEQ ID NO: 1050 - DNA, 121 bp, synthetic construct
  misc_feature 1..121: note = Description of artificial sequence: synthetic polynucleotide sequence
  source 1..121: mol_type = other DNA
cctgaggcagtccatgtggatgcactggggcgccttgtactccccctggctgtccttctggaagcctatctcctgctgcatgctcagaccgtggactgctgcccgggcctccacaaatggc

SEQ ID NO: 1051 - DNA, 121 bp, synthetic construct
  misc_feature 1..121: note = Description of artificial sequence: synthetic polynucleotide sequence
  source 1..121: mol_type = other DNA
gagaagacacagactcaccagtcaaaaaagtccccgttgtaggtgaccatgatggtgggtttggtctcctggacgtgttcaaaccacctttggatcagatgagcctgaacccaagtcacag

SEQ ID NO: 1052 - DNA, 121 bp, synthetic construct
  misc_feature 1..121: note = Description of artificial sequence: synthetic polynucleotide sequence
  source 1..121: mol_type = other DNA
cttacctcatcgggttcattgaagacacaaaaggggccttcatattctggcttgggggtgaactcaaaatcttcaatatcttctgaaacaatctccctgttggtgatgaggtagccctagc

SEQ ID NO: 1053 - DNA, 121 bp, synthetic construct
  misc_feature 1..121: note = Description of artificial sequence: synthetic polynucleotide sequence
  source 1..121: mol_type = other DNA
tgctcacctggccatcgatcatgtaggaaatcatcataatctggtctgtctcagcatcaggaaacttgaggggcagtttggtcgtctcaatgtcaaatgccaaaaccacagggtcctgtgg

SEQ ID NO: 1054 - DNA, 121 bp, synthetic construct
  misc_feature 1..121: note = Description of artificial sequence: synthetic polynucleotide sequence
  source 1..121: mol_type = other DNA
gtaacacaagcaaaacttacaggtcgttcaacaaggtcatctcggcgggtgatttctaccggaaaagcatttcctcggtatctgacattgtaccaatgagcctgcaaaacacacagtgtgc

SEQ ID NO: 1055 - DNA, 143 bp, synthetic construct
  misc_feature 1..143: note = Description of artificial sequence: synthetic polynucleotide sequence
  source 1..143: mol_type = other DNA
ccacgtggatcttcaggtcaatggagaggcggatgtggtagggaacatcgtactcgcgcatgtccacaatgttgtccaactggtcagctatcttcttagaggtttcctcttcatcagtaatgacaccgcccctctgcagaaca

SEQ ID NO: 1056 - DNA, 156 bp, synthetic construct
  misc_feature 1..156: note = Description of artificial sequence: synthetic polynucleotide sequence
  source 1..156: mol_type = other DNA
cctggaaagcagagctgtgtacgcgtcgctggcgtgatcctgctccctgttcttcttcacggcaggggagatctccttcctcactttgacaagatcctccacagtgtggaaggacagcctgatgtaatttcgcttcaaacccaccaagtgatttgg

SEQ ID NO: 1057 - DNA, 121 bp, synthetic construct
  misc_feature 1..121: note = Description of artificial sequence: synthetic polynucleotide sequence
  source 1..121: mol_type = other DNA
tgggtgatactcaccaagtccagatcctctttggggacagtctccacttttgcaattttgccctgaaacttcttggagagaaaagatgaaacttctcgctcacaaccctaatcaggatcag

SEQ ID NO: 1058 - DNA, 121 bp, synthetic construct
  misc_feature 1..121: note = Description of artificial sequence: synthetic polynucleotide sequence
  source 1..121: mol_type = other DNA
cacaggtcgtctgacctgagtctatgaaacacactcacctttctggtcgcaatgtagaaatacggtttatagggcaaagccacctgttaagagtcaccaacccatccaggggtgatgagaa

SEQ ID NO: 1059 - DNA, 121 bp, synthetic construct
  misc_feature 1..121: note = Description of artificial sequence: synthetic polynucleotide sequence
  source 1..121: mol_type = other DNA
tgtcgcagtcaggggcttaccttaaatctgcttccgtcatcttgaataaagtagtaatccactgcactgcctaagcgcttatcttcatctaaaatctcggtctacaagagaatcagtcaac

SEQ ID NO: 1060 - DNA, 143 bp, synthetic construct
  misc_feature 1..143: note = Description of artificial sequence: synthetic polynucleotide sequence
  source 1..143: mol_type = other DNA
caggatgcatgttaatgagccagcctgtcttctcaccaggctccttcagccgctcaaaaccaaaccgcaaatccatcttatccgtccactgactccgttccaggcgcttgagtgccgaaactgaggaagtggcgccatcatcc

SEQ ID NO: 1061 - DNA, 121 bp, synthetic construct
  misc_feature 1..121: note = Description of artificial sequence: synthetic polynucleotide sequence
  source 1..121: mol_type = other DNA
gcccgagagcctcaggagggcgcccctcacctgctggcctcgccatccgcgcctgggtccgcgcgccgccgcccgccgctcctcagagacatggagccgttggctaccacctctgcttcag

SEQ ID NO: 1062 - DNA, 121 bp, synthetic construct
  misc_feature 1..121: note = Description of artificial sequence: synthetic polynucleotide sequence
  source 1..121: mol_type = other DNA
aaatatacaagtccatgttctttcagcccctttgcgctcataacgtcagacgctggcctccaaacacacagtcatcatagggcagctgaaaacaaggggaaaaaagacacgttaagcttcc

SEQ ID NO: 1063 - DNA, 271 bp, synthetic construct
  misc_feature 1..271: note = Description of artificial sequence: synthetic polynucleotide sequence
  source 1..271: mol_type = other DNA
cctcgtcctctgtgaactccgtgaactctgactctgtgtcatagctctcctcatcctcactctctggcagcatctgaaggttttctagtgtcagctggcccagctgctgctgtatccgggtgcttgggcggccccaggtgagctggtagggagaatagccctggtaggtaactctgttgacatcagccccacacttcaacaggagtgacaccaggtcaggattttgcaggtccactgcgaggtgaagggcagtccggccattacagggctc

SEQ ID NO: 1064 - DNA, 121 bp, synthetic construct
  misc_feature 1..121: note = Description of artificial sequence: synthetic polynucleotide sequence
  source 1..121: mol_type = other DNA
ggcaggaagcaccaacctgagcattgacatcagcacccaaggacaccaaaagctccacgatgcccaggtagccatggatagaggctaagtgtagacacgtgtggcctggaagaacaaaagg

SEQ ID NO: 1065 - DNA, 212 bp, synthetic construct
  misc_feature 1..212: note = Description of artificial sequence: synthetic polynucleotide sequence
  source 1..212: mol_type = other DNA
ccattgtagttggtagccttcaggatggagtggaggtgcggggtggtgcaggactgagtcaggactcccacgctggccaggcagccctgctcacaggcaaggtgtaggggggtatttcctcgaaagtctcggagctcaggatcacagccagctcccagaagtgcctcagcaatttctggctggttggtgatcacagccaagtggagtggagt

SEQ ID NO: 1066 - DNA, 121 bp, synthetic construct
  misc_feature 1..121: note = Description of artificial sequence: synthetic polynucleotide sequence
  source 1..121: mol_type = other DNA
gcgcacctgctgcaggttgttctggaagttgaggaaggccaggtctcccttcacctggcggatcacttccatggtcagtgccttttcttcatggatgatggccaagtgcaggaacctgtgg

SEQ ID NO: 1067 - DNA, 228 bp, synthetic construct
  misc_feature 1..228: note = Description of artificial sequence: synthetic polynucleotide sequence
  source 1..228: mol_type = other DNA
cgagtccccgtcctcggtgagctgctgcttccagggctccgagccgcgcggcacctcctgcggctcgaggcggatctcctgcagctccttgaccatctgctcgtactcctcgtctttcatggagtccaggccgctgtcgtggcggtcgtccagtagccgctccttcttcagcccgtcgcgggggccctccatggcccactcctgggggcgctcggccgcctggaacat

SEQ ID NO: 1068 - DNA, 134 bp, synthetic construct
  misc_feature 1..134: note = Description of artificial sequence: synthetic polynucleotide sequence
  source 1..134: mol_type = other DNA
agattgcatttccaaagatggttgctagctgctgccgtttcctttgctatttctgtcgaattagccggcaaaatcagaaggccatgtttgagcatctgagttatcttctggagaatagcagtgttggcctaggt

SEQ ID NO: 1069 - DNA, 121 bp, synthetic construct
  misc_feature 1..121: note = Description of artificial sequence: synthetic polynucleotide sequence
  source 1..121: mol_type = other DNA
ctcatccagacaggaaagggggaagccatccgcatcaggtccatcctgcgctccctggtccccacagaagacctggttgggatcatcagcatccccttgaaactgccctccctcaacaaag

SEQ ID NO: 1070 - DNA, 121 bp, synthetic construct
  misc_feature 1..121: note = Description of artificial sequence: synthetic polynucleotide sequence
  source 1..121: mol_type = other DNA
ctgggtgggccacagcttgctgcacgtcttcagtaccgagttccgagctcagcccctggcctactatgaggccgcggtccgggcgggccgcctgcaactcaacgagaagccggtgcaggac

SEQ ID NO: 1071 - DNA, 121 bp, synthetic construct
  misc_feature 1..121: note = Description of artificial sequence: synthetic polynucleotide sequence
  source 1..121: mol_type = other DNA
acctttcctctctgcagacacgagtggctttgacgagctccagcgcatccatttccccagtgacaaaggtgagatcctccccaggtgccctggatcagggcagacgctgacactgccatcc

SEQ ID NO: 1072 - DNA, 121 bp, synthetic construct
  misc_feature 1..121: note = Description of artificial sequence: synthetic polynucleotide sequence
  source 1..121: mol_type = other DNA
gacttatccaggaatcgatcttctccaaggctggacagggagggagtgtggaaaccacagtctttctgataggataaaaagtgtcacttggagacactctggtttcctgaggaaaggaaga

SEQ ID NO: 1073 - DNA, 121 bp, synthetic construct
  misc_feature 1..121: note = Description of artificial sequence: synthetic polynucleotide sequence
  source 1..121: mol_type = other DNA
acgtatcttccttgtttatttgacttttggctctaataataaggtctctcttgcaggcaaccaagttgttaaaagccttgaaaggctacattaaacatgaggcaagaaaaggaaatgagaa

SEQ ID NO: 1074 - DNA, 121 bp, synthetic construct
  misc_feature 1..121: note = Description of artificial sequence: synthetic polynucleotide sequence
  source 1..121: mol_type = other DNA
cctggagcggaggccggtctgagttggcatcaccaccgcccctatttcctttcttcaccaactgcactgctggggctgcaccagctgcgagaaactgactctggaagtgcagcaggtccac

SEQ ID NO: 1075 - DNA, 121 bp, synthetic construct
  misc_feature 1..121: note = Description of artificial sequence: synthetic polynucleotide sequence
  source 1..121: mol_type = other DNA
ttactgtctccttcaggaacctgattctgaacagcagcccttaaaacaactcacctgtgacttggaggatgattctgataaattacaaggtcagaatgaaaactagatcttaacatttgat

SEQ ID NO: 1076 - DNA, 121 bp, synthetic construct
  misc_feature 1..121: note = Description of artificial sequence: synthetic polynucleotide sequence
  source 1..121: mol_type = other DNA
cttgatgaggtcgttgagcttgcgcaccgctgccttctgggggaggctctggatgtctctaaagaggtcctgggcctcagcctcgaagagccggcggttgtccgtgttctgcaggggctgc

SEQ ID NO: 1077 - DNA, 121 bp, synthetic construct
  misc_feature 1..121: note = Description of artificial sequence: synthetic polynucleotide sequence
  source 1..121: mol_type = other DNA
cctctcccgagcctggtgccggtccagagccagctggagggcgcacttcaaggtctccacgttgttcaggacgttgtatcgactgagggccaccagccgataaaagtcctggggctcatag

SEQ ID NO: 1078 - DNA, 121 bp, synthetic construct
  misc_feature 1..121: note = Description of artificial sequence: synthetic polynucleotide sequence
  source 1..121: mol_type = other DNA
tggtggccacttcaaacccccatccctctccttttaatactgtttgtatctattccagttttgctgaccagaggggtcattatcccagcaagtgtgtggtggagaagatcttggtcttagg

SEQ ID NO: 1079 - DNA, 121 bp, synthetic construct
  misc_feature 1..121: note = Description of artificial sequence: synthetic polynucleotide sequence
  source 1..121: mol_type = other DNA
caatgtagtatctaaacagccaggcccggtgacaaatggtcagcttcagcaaccaacaacgggagcagccagtggtggatacattaaacggtatgccaactcctcctgatattcctgtacc

SEQ ID NO: 1080 - DNA, 121 bp, synthetic construct
  misc_feature 1..121: note = Description of artificial sequence: synthetic polynucleotide sequence
  source 1..121: mol_type = other DNA
ggtctcccccttcctctccctgtgtcaccagctgctcttggagaagtgactctgcctggcgcaccagatctgccaccagtgtagccctgcagcagggacagcaaggttggggatggttgga

SEQ ID NO: 1081 - DNA, 121 bp, synthetic construct
  misc_feature 1..121: note = Description of artificial sequence: synthetic polynucleotide sequence
  source 1..121: mol_type = other DNA
gcaaagacctaacagaaatcaggaacactgtactgagtgagaatgaagaaagcagactagaaactatgctcaacaaatcaactactttaggaaacacaacttgtggatgagggagaaagga

SEQ ID NO: 1082 - DNA, 121 bp, synthetic construct
  misc_feature 1..121: note = Description of artificial sequence: synthetic polynucleotide sequence
  source 1..121: mol_type = other DNA
agcttcctccctccccgggcacgccagggacctcaccatggcacacaccactctgctgacgtagacggggcttccccgcagagcacagtctgtggctgggtcagtctggaagtgcaggctc

SEQ ID NO: 1083 - DNA, 121 bp, synthetic construct
  misc_feature 1..121: note = Description of artificial sequence: synthetic polynucleotide sequence
  source 1..121: mol_type = other DNA
cttgtggtgatacagtggactcaggcaggagaggggggttttctaactccactggttcaccactttgaagtttcttctgaaaaggctctcctccttcttcagataacactgacgtgtccat

SEQ ID NO: 1084 - DNA, 121 bp, synthetic construct
  misc_feature 1..121: note = Description of artificial sequence: synthetic polynucleotide sequence
  source 1..121: mol_type = other DNA
cttcgagagtcgcatctccgacacgggctctgcgggcctcatgctcgtcgagttcttcgccccctggtgagtccattctgccgaggcgggggaagaaaggcggggctgggccgggggcgag

SEQ ID NO: 1085 - DNA, 121 bp, synthetic construct
  misc_feature 1..121: note = Description of artificial sequence: synthetic polynucleotide sequence
  source 1..121: mol_type = other DNA
gcaacctcatctcacttaaccagaggcagagcctctgaaacgtggctgaggcagaagctgcggatgtgctttcagacaagtaccattgggtccctcaacttgttagtttcctgaaggttct

SEQ ID NO: 1086 - DNA, 121 bp, synthetic construct
  misc_feature 1..121: note = Description of artificial sequence: synthetic polynucleotide sequence
  source 1..121: mol_type = other DNA
ctgcccagcaacaatggggagggagtctaccctggaacaagaaggctggtgatccatgcagtgagaaaaggtgcatacagaagatgagacaagacaatgctggaaaggggggtagcagaga

SEQ ID NO: 1087 - DNA, 121 bp, synthetic construct
  misc_feature 1..121: note = Description of artificial sequence: synthetic polynucleotide sequence
  source 1..121: mol_type = other DNA
acaaagcacagctgctggtctccactactgtctacaggaatacactttgtgccaagggaaaaacactgcatgccctgggtctccaaatcccagagggtaatggtatagcccatcctttcca

SEQ ID NO: 1088 - DNA, 121 bp, synthetic construct
  misc_feature 1..121: note = Description of artificial sequence: synthetic polynucleotide sequence
  source 1..121: mol_type = other DNA
cctgaagctgacagcattcgggccgagatgtctcgctccgtggccttagctgtgctcgcgctactctctctttctggcctggaggctatccagcgtgagtctctcctaccctcccgctctg

SEQ ID NO: 1089 - DNA, 280 bp, synthetic construct
  misc_feature 1..280: note = Description of artificial sequence: synthetic polynucleotide sequence
  source 1..280: mol_type = other DNA
ggtactccaaagattcaggtttactcacgtcatccagcagagaatggaaagtcaaatttcctgaattgctatgtgtctgggtttcatccatccgacattgaagttgacttactgaagaatggagagagaattgaaaaagtggagcattcagacttgtctttcagcaaggactggtctttctatctcttgtactacactgaattcacccccactgaaaaagatgagtatgcctgccgtgtgaaccatgtgactttgtcacagcccaagatagttaagtggg

SEQ ID NO: 1090 - DNA, 121 bp, synthetic construct
  misc_feature 1..121: note = Description of artificial sequence: synthetic polynucleotide sequence
  source 1..121: mol_type = other DNA
tttaaaagtaaaacttaatgtcttccttttttttctccactgtctttttcatagatcgagacatgtaagcagcatcatggaggtaagtttttgaccttgagaaaatgtttttgtttcactg

SEQ ID NO: 1091 - DNA, 121 bp, synthetic construct
  misc_feature 1..121: note = Description of artificial sequence: synthetic polynucleotide sequence
  source 1..121: mol_type = other DNA
ggttgtctgtggggcagtctaaggagttcctgcaaatctctgatgctgtccatttcttcacggtgggtgagccctgggccttgaacaatcccttagaaaaactaggaaaaatatttcatag

SEQ ID NO: 1092 - DNA, 121 bp, synthetic construct
  misc_feature 1..121: note = Description of artificial sequence: synthetic polynucleotide sequence
  source 1..121: mol_type = other DNA
ggcacaagccatgcccaacagtccccaactcaagcccattcagcccaagcccactgttatgggagaacctttcacagtcaaccctgccttgactccagccaaggacaagaaaaagaaagac

SEQ ID NO: 1093 - DNA, 121 bp, synthetic construct
  misc_feature 1..121: note = Description of artificial sequence: synthetic polynucleotide sequence
  source 1..121: mol_type = other DNA
agaaggaatcttcaaaggaacttgaaagtcctctgacccctgggaaggtgtgtcgagcagaggaaggcaaaagcccattcagggaatcttcaggagatgggatgaaaatggaggggctcct

SEQ ID NO: 1094 - DNA, 121 bp, synthetic construct
  misc_feature 1..121: note = Description of artificial sequence: synthetic polynucleotide sequence
  source 1..121: mol_type = other DNA
cctctccccggatgttccacgcacacagtggctcccacggacccaaactagagaacaaccctgactggtgctgctctgatgctagcgggagcaacagtgaaagcctgcgggtcaaggcctt

SEQ ID NO: 1095 - DNA, 121 bp, synthetic construct
  misc_feature 1..121: note = Description of artificial sequence: synthetic polynucleotide sequence
  source 1..121: mol_type = other DNA
agcctcttcaccaggccatcctctaggtccctaacagaggagaacagtgccacagagtccaaaattgccagcatctccaactcgcccagagactggcgcaccatcacttataccaaccgtg

SEQ ID NO: 1096 - DNA, 121 bp, synthetic construct
  misc_feature 1..121: note = Description of artificial sequence: synthetic polynucleotide sequence
  source 1..121: mol_type = other DNA
ccaccctaggaaagacaggattctctgccaccaggaagaatctttttgaaaggcctttattcaatacccatttacagaagtcctttgtaagtagcaactgggctgaaacaccaagactagg

SEQ ID NO: 1097 - DNA, 121 bp, synthetic construct
  misc_feature 1..121: note = Description of artificial sequence: synthetic polynucleotide sequence
  source 1..121: mol_type = other DNA
atgaaagctcttatttcccaggaaatgttctcacaagcactgctgtgaaagatcagaataaacatactgcttcaataaatgacttagaaagagaaacccaaccttcctatgatattgataa

SEQ ID NO: 1098 - DNA, 121 bp, synthetic construct
  misc_feature 1..121: note = Description of artificial sequence: synthetic polynucleotide sequence
  source 1..121: mol_type = other DNA
aataacaaataacaacaaaagcctagtggtgcaaacactttttttgcagagacatcaaagcaatgtggaagtcaagatctggccttaccagccactttagcttcaaggaaaataaggtgct

SEQ ID NO: 1099 - DNA, 121 bp, synthetic construct
  misc_feature 1..121: note = Description of artificial sequence: synthetic polynucleotide sequence
  source 1..121: mol_type = other DNA
acacaatccatatcatggggcagattatgaggcccagccagaagattcgtgcttcagcttctgtggcagcaatgctattcggagagacctgttaaaggaaagtaattcaaatgtcaaaaca

SEQ ID NO: 1100 - DNA, 3781 bp, synthetic construct
  misc_feature 1..3781: note = Description of artificial sequence: synthetic polynucleotide sequence
  source 1..3781: mol_type = other DNA
tccttggggaagctgagggcacgaggaggggctgccagactccgggagctgctgcctggctgggattcctacacaatgcgttgcctggctccacgccctgctgggtcctacctgtcagagccccaaggtaaaaaggccgggaaagcatcttaatttagcgtgcagtctcagctggtcctgccattccagataaacagagaaaccattctgaattggggatgggggtgaggatgggaacaggagtctgtgtcctgctggggcaggccattggaagatgtgaaagagttgtctatttccttccaccggagggagacttcaggtcagccaggtgtctggagtatgaaccatgtatcagcaccgaaaggttctagaagtcagactttcgggcagtgtgtcactaactctcagcatgctggcctggctcggcccacagcaaggtcttctcgcctccctttgggtaaatactgaggggtgcctctgcaggacgggacctctgccagactccactccatacccagagaagcagggaaaccaaaattggagtcagccttgaggtgtagctgttgagccctcagcagctggggagagctggcggatgctgccctccccccagtttcctaatggtgttgtttaaaaagggtcaggggacgggggaacagatggtgggaagagcacagtgcagacacctggcaccggctctgaaggcagcatggcagctacaccgttggctgggaagggtgtgcccctgaagaagtcgtttacattctcgagtcaattttcctggagtgtacaatggacctgtgggaaagcctgtatgaaagggtaatgatgagggacctagcacagtgtccaatattttataggaactggaattgagctcataggagctcaattttattggcattgctgttgttggatggttaaaggggtggtatcccttttctcagactcccctgaaatgtatggtttgctttgaacccagagactgatgacaggtctgccggtgtggttgggtgcagccttaagttgctacgggaaagtgttggagggggagaagtcagaggtaaccttgccccctccctcaattccagatgaggaaattcaggcctgaaaagggaaagtgaccacctcaaagtctcatgccttggaggacccagcaggaatccaagacctctgaaaaggaccggcagggctcttgccacggctgggggtgtggtcatggtaacacaggttttccatccatggaaggtacctgagggattttctcttcctccctagggccagcatcagaggagtgaatagctcagttagctcatctcaggggccatgtgccctcggaggtggtttgccactttcacggttggactgagttggagagaaacagagacccacccaggggtggggacaagctccctgcaactcaggacttgcagatcacttgcccaagtggctccctagctcctggctcctggcccggggcctgggactctccccgaagtggggctggccactgtgaggaaccgactggaggcagggacctcttggatgccccaggcagttgggatgccacttctgataaagcacgtggtggccacagtaggtgcttggttgctccacagcctggcccgagctcagcgctgcagaaagaaagtgaaagggaaaaagaactgcggggaggcggggaggtaggatgaccagcggacgagctgccacagacttgccgcggccccagagctggcgggagggagaggccaccagcagcgcgcgcgggagcccggggaacagcggtaggtgaccaaagtctcctctgtaacccctaaggtcgggctgagaatcgaggctccgagactgtcagctacttgctcaaggtcacacagcaagtctgggaggatggggggatggaatatgcaaaatgtagggccgggaaacacctcgtttccagcatccccgcaacgactctgcgcgggaaccaggagccgggaacccggagcttggcttgctgtgcccagagctccggggccgtgggcgggtggcaggaaagcctggcggcagcttctgcagagaagccggagcgcagactgggagcgcggagcagacacactcccccggccacccttggccgactccgcgcgcccgggatcctgcagaggtgcgcgcccttcttgtacgccagactttggaccagggccgccgttccctgagcttcactttccctgttgggtcatattccatctctaactctggaatcttgggtattgggctctccaggcggggggccctgctcagggaggcagtagggagccaaacctttaaccagaggatgggataagtcctcaactctcgttgaacatcttggcgaaggtgtgtgttgttgggaggggtgggggagggatccccccggactgaaccgatctcttgatctctcacttctctacctcgctttggggccctgagtcacaccctctaaggagagaggctaaagcgccccggaaagccagcgtgcgaatgccggggtgggagtgggagattggatctccctggggtccaggaaagccggaatcggagccaccatgcttagcttagtctggaactcttaaaagccgcggtcctcctgagtcccacagcccctctccaccctaggtggcacaggagaggtggcaaaagcctagaagttcaaggcatggctccctccccagccgcagcctggagtgtctaactttggcaggaagtcttccgtttctgctccccactccagagaaaaaataaataaatacttctccggagtgagattaaggaaacaggtacttcttcctcttggagaaagaggagccaaaggaacttgactccaacaaatgatcaccttgcaaacccccggctcccttaggggatgacctggtctccaacaatctcagagcgtttggaggcagggtctttggagatgactgagtggggaatcccaggctccccacacatgaacatcacctgggatgatcaacctgttcaggatgtaggttcccgggctcacccccaggcccggttggctaggcctggggtgaggctgagatcctgcaggttaaaccatctatcccaggtgactccaatgttcgtttgtggggcaaaagtccctcaagtcagagacactgggaggcgctgatgtggtctcatctctttactctctccctgttacaaaacctctatcagaaaaggagtaccaggaggtgttttgttttgttttgcttaacgccacatagcaagcagtttgcagacgcaggatttgaaccctggtctactgagagcccagcccagtgcagcaagcagatgtgaacctccacaaatgcagggcaggtcccaggcagtcagagagaaacctgttgatacccagtctgtctgatggctggggcttggtttcatgtcctaagacccagcctcagataccttgagaagagcagaatcagaaattaacccaaggaaactctggattagttccaggcaatcagggaagtggctggagggaggtaggaaacttctggacttagcctcagatttgccttgagtcacactgacaagtgacttcccctctctgaggttcatctgtaaaatggataaaacatgagagcttgcttgatgatgtctgatgtgtacagaaaaagcactttagaaaaccaccaaagaatattcatgcattgggaataattattatagatcctaaagggattgtttagaaagatcagagaggggccgggagcagtggttcacacctgtaatcctagcactttgggag

SEQ ID NO: 1101 - DNA, 360 bp, synthetic construct
  misc_feature 1..360: note = Description of artificial sequence: synthetic polynucleotide sequence
  source 1..360: mol_type = other DNA
gggcaacagagcaagactgtctcaggaaaaaaaaaagagagagaaaaaagtcagagaggaaagcataggcagatgggaggtttccaaagaccaagacacacacagtcaaaagacagttcagaaaggggcattagttaccaccgattctcataggaaggacatagatagttttcagattccttcaatccttctgacatcaaggacaaagtctctgattttccctgatgtttgacagtgccctaatgcttgctaagatttctttttaacaaagtggtaaagaagctgagattattttagtaacattgtttctttttcaaccacaagtgatactgttggtttggttttgcttttccgtttata

SEQ ID NO: 1102 - DNA, 480 bp, synthetic construct
  misc_feature 1..480: note = Description of artificial sequence: synthetic polynucleotide sequence
  source 1..480: mol_type = other DNA
catggaaaaaaaagttttctttttgtaaaatcatggtaaaatacatataacataaaatttaccattttaaccactttcaaatgtacatttcagtggcattaaatatttcaaactgttgtgcaacctccgctaccatccatctccagaactttttcatcctcccaaactgaaactctacccaataagcaataactccccactgccccttccacccagctcgtggtaactccaacttcctgtctctatgttttgggctactctagacaccgcctataaatagaattacgtgatatttgtctttttgtgcctggcttctttcacttagcataatgtcttccaggttcatccatgtcgtgccatgtgtaattcctttctatggcggaatagtattctaatatgtggatatcccatattttgttcatccattcatttgttgatagacacttgggttgttcctacctcttgactattgtgaataat

SEQ ID NO: 1103 - DNA, 481 bp, synthetic construct
  misc_feature 1..481: note = Description of artificial sequence: synthetic polynucleotide sequence
  source 1..481: mol_type = other DNA
cttgctaggtacatgggtggacaaatatctgtctgactccccgctttcaactctagaaagctttcttttaaaatcggtctatttaagtttctttaaaaagttaatttaagaaaaatactaaggtaaattgtagaacaggtgatatgtcaatatgaccccaaaaattgtaaagatggaagacgaatgcctgcagtttgggaaaccggatgagaggaaagacctggaagctattgtaaaatctatgctgagggtctggtgactactagaccaagggcatggcagcagagggcagctgaaagacttcaggaaggaaagatataagaattaagaaaggggcctggtgcagtggctcatgcctgtaattccatcaccttgggaggtcaaggcaggatgatggcttgagaccaggagttcaagaccagcctgggcaacagagcaagacctttttttaggaaaaaaatatataaattaataaaaataa

SEQ ID NO: 1104 - DNA, 240 bp, synthetic construct
  misc_feature 1..240: note = Description of artificial sequence: synthetic polynucleotide sequence
  source 1..240: mol_type = other DNA
gaatcactgggggtgaggcccaggacgctgtgtttttaacacccttcccaggtaattctcactcacagccaagcctgccgatggctggactccgtagtcagatctcagcaagcaggactggctcgtggttcatcttggggtctccagcacccagcagagtgctggcggggggactgtgttaagtagagccggatgggtcaggactggagtgtggggcctggctttgctaactgcagtcac

SEQ ID NO: 1105 - DNA, 241 bp, synthetic construct
  misc_feature 1..241: note = Description of artificial sequence: synthetic polynucleotide sequence
  source 1..241: mol_type = other DNA
aagatcctcatcactccaccccctaccccagcaccagggtcaggttcccttccaggaaaaacttgttggactcctttccaggtcattgactgcagttaggagtggcatgcagaagggaggctatctggagctgggacagaccaggcaagcggggaagggaactcttatcccaaccctgcattctggacagggaccgaaggtctcctggctgcagctcatacagctcatcttcattctcatc

SEQ ID NO: 1106 - DNA, 481 bp, synthetic construct
  misc_feature 1..481: note = Description of artificial sequence: synthetic polynucleotide sequence
  source 1..481: mol_type = other DNA
ctgggaccaccaggcccctcacccacaataactttaccctttactggcaaatgcacaagctggagatgatggcccattcgagttttaagattttccaagttgttatgaggtcagtgtcctcaatcgggacccagagaagataggtggcttgcctgaactttcagagggggcatctgtggtgtcttttgtggggtcctgtaggatttccacgtccctcttggaggaaaaatagaagtaagttgtctcaggtcagattgtctgggaagccaagtaggagatggagatttgcatataggaggtttactggggacattcacaggagggaacacccgaaggaaaagggaagaaagcagggttgggaagcagcaggagttgaggtgcaatgcagtcacaacagaggtcttagccaatcccatagggagcactcaagctgggacagcaaggaagctagaccttcacatccctcatctacctccgtcct

SEQ ID NO: 1107 - DNA, 481 bp, synthetic construct
  misc_feature 1..481: note = Description of artificial sequence: synthetic polynucleotide sequence
  source 1..481: mol_type = other DNA
cccatacaggcatagcctcccccatgatgaacactcagcaccagactgatacatttgttataatcaatgaacctacattgatgcatcattattacccaaggtccatggtttgtttacatgagggtttactcttggtgttgtacattctgtgggtttggacagatacatgatgtaatgtatatgacattatagtatcacacagactcatttcacttgtgactgagcttgtccttctttctttaacctgcctccaactgctgagaagccctttggctagggattgcagccaattttaatttgttttccactttcctgctctgaagttactttgtttgccagaggctggttggttcaaacccaaagggcagggagctgcaatggaaatccattcaacggtgctggaattgggatggcaaaaaggagcagcaggcaggtgtcagcagggagcagctctttgcatcccacagttcccagggagctt

SEQ ID NO: 1108 - DNA, 480 bp, synthetic construct
  misc_feature 1..480: note = Description of artificial sequence: synthetic polynucleotide sequence
  source 1..480: mol_type = other DNA
ggtctcaaactcctggcctcaagtcatcctccctcctcagcctcccaaagtgctgggattacaggtgtgatctcagacagcttacctcttaatcacctttccatctgagctggcagcagagctgggaaagtgcacccaacaccccagatgctgcaactttagtgcttcctgctccttctctgtgtggaactggcctgtttgggtacccagggccagtcccctccaagaccctctgtagaaaaagaccctactgtacacctcaattccattgcaggacaggacataattgaatcctgcctctccctgccccagtcacccatccctcccaagccattatcttgggacctgcaagggcctccaagccaagggtggcaaatccaaataccaaaggggccataatgatgtaaaatgtgtccaggcagaaggcaatagggagtagtggggcctctggtaacaattgtgtgtactctatatagagac

SEQ ID NO: 1109 - DNA, 480 bp, synthetic construct
  misc_feature 1..480: note = Description of artificial sequence: synthetic polynucleotide sequence
  source 1..480: mol_type = other DNA
attgtgatggtgatttagacacacacacacttatattggcttgggaaacaaaacaaataggcctatcgactggattcaacttttgattttgcagccaagcccctgtggcacagctgaggagcttgcaggtcagaaaggggatttagagccaaccaatagcaatatctccagacctctcctgacacgaagctcatctgacctcctgcccccattacacacatacacatgcacacacatgcatgcaggcacatgcacgcacgtcttctagtctccctgccttgaggacaaatgatcagatcctgcaactgtttccaggcccataagcccctgagcattgcagtgttgctacatgccttagtttcctctccgtctcctgtgacctcctcgtgccactccaggaagtgaaagtcttgagtgagaccagtagtttctcttaagtcctctctctgtctcgttctcctgggatatctacacttggtt

SEQ ID NO: 1110 - DNA, 481 bp, synthetic construct
  misc_feature 1..481: note = Description of artificial sequence: synthetic polynucleotide sequence
  source 1..481: mol_type = other DNA
tgcaaacagcaggctggagagtgaggggcttcttcctctacatccagctcctcccccatcctgctccaagtccagcatgttcctatctcttccccaggaccctgggctcttgggcacaaatcaagccatcaccagacagcctgtggggtggcaagagcagaggtttgtttctttgtgaacatctataggtaccaggctctgtgcaggccctattgttggtgagccatagaggtaccaacctcaccccatgaatcctcctttgtttcttttcttttcaacccctgggcctttaaaccttcgattaactgcccagtgcagcccaggtcatggtacactatgatctttggttcacatgagggttttctcttcattaatgtccctatttcccatactgggtgcccattctaatgcatttcaggtgtatctttctgtttgtatgtgctcttataaaacatgttttgccttttttttttttttttag

SEQ ID NO: 1111 - DNA, 360 bp, synthetic construct
  misc_feature 1..360: note = Description of artificial sequence: synthetic polynucleotide sequence
  source 1..360: mol_type = other DNA
cccaaagtgctggaattacaggtgcgagtcaccacgcctggccacagtttcttacttttgcattctgtactatgtttttaggatctacttgccttgcttctgatgcatttgatctttgcttctaatcacggacattgttctctatggagtgcaggggttacttttcacctgtccacacccccagtgatggacacctaggtgacctccaactctctgtcaccacaaataacacagcagtaaccatcctcagatgggttctcctggggagttgtgggaacatttcttcaggatatatagacccaagagctgaattgccaggtggtaggatctacatatccttagatattctacatgatgcca

SEQ ID NO: 1112 - DNA, 480 bp, synthetic construct
  misc_feature 1..480: note = Description of artificial sequence: synthetic polynucleotide sequence
  source 1..480: mol_type = other DNA
ggtcgttctccagagcggccccatccatctacattcccacaaacccgtgtaaccaacacttggcatttcccagatgtctaacttttgccagttgtacagtatcaagtgtcactttgctgttttatttttggagtttacatcttagtaccacttactcgctaagtcactttaggtaagtcacaacaacccagtgacataagcactgtgccaacaaaatgcagtcgattctgtgactcagagaggttgagtaacatttgcaaagtcacacagcaagtgtggaactaagatttgaacccagagcctgcacccttaaccactatgctattattatgttttgtctctctcctaaaatatcatctgggtctacattgcaagcctctttggcagggactgtgtggtaaacctctttggggccagtaaggaactgagctcagtgactttcttacggggtgctcagtgaatcattgttttacagcttta

SEQ ID NO: 1113 - DNA, 481 bp, synthetic construct
  misc_feature 1..481: note = Description of artificial sequence: synthetic polynucleotide sequence
  source 1..481: mol_type = other DNA
gaggggaaaagtgagagatgtttcttagagtttatctggaggactacagggtgcatgagcaaaagcggaactcatttgagctactacccccacaaagaagctgtttggggtctggtcatggtagataggcattcctaggcccctggcttcccaacaccatttggcccccggaagcagcttgtcatgaggttggggagcaggttggtgttggggggggccttgggggaaaggaaaaggagaagactgccaggcaacgaggaatcagaatctcaaaaagactcaattgaaggggctccaacactcgttgaaacggaggctcagagggctaaggtaatgtactcaggatcaaaggcagagcagaaactcaaaccatgtctctaggcacacagttcagaggtcttcccattattcctcaggaggagaagttcatggtcaagagtagggaagtattccttctcaagctttttttttttttgtctga

SEQ ID NO: 1114 - DNA, 360 bp, synthetic construct
  misc_feature 1..360: note = Description of artificial sequence: synthetic polynucleotide sequence
  source 1..360: mol_type = other DNA
caaagtgctaggattataggcgtgagccaccacccctggcctccttctcatgctctttaatcacagttcagagcagtgctggaggcttttaggggtagcaaaagagccttcttctccctttcagtgcctccttagaccctcaaagatagactccccgcctctgggaagaaaacatctaatgaactggacgtaatctcagcgcctgcgtctgtaaaatggctataataacaacaatctcccagagttgccgttaacagttgaaacagaatagtaaatgcaaggcatctagcacagccccagacacagagaaatctcccctggtcactctcacagaggtaagaagcacattaataataaaaa

SEQ ID NO: 1115 - DNA, 121 bp, synthetic construct
  misc_feature 1..121: note = Description of artificial sequence: synthetic polynucleotide sequence
  source 1..121: mol_type = other DNA
tggtcatcacgcatattgtactcaccatgcagaagttgtgctgccttaagctactgttcattgagcacttactggtcgccagtcccctttctaagggctccatgcaacttaactcccctaa

SEQ ID NO: 1116 - DNA, 361 bp, synthetic construct
  misc_feature 1..361: note = Description of artificial sequence: synthetic polynucleotide sequence
  source 1..361: mol_type = other DNA
tcctatgagttgccaattattatcccccactttacagataaggaaactgaggctccaagtggtttaaaaaatgaacttacccagattgtagtgcgttggtaggtagggataacctgaaagttgggaaatttcaccccaaagctcaccatctgagctccattcatctcccaccagctgagatggaacgttatgctgttcccagaagagatgcatgcactgatcttcagatagtttaagtctgagttagaacattgtggcgacacctgatttccctcgggggagagagaggtgaattgttatttcagacacctgtttagtgtctacacttagcctttcaaatcctgcatgcagtgtgaagtgg

SEQ ID NO: 1117 - DNA, 121 bp, synthetic construct
  misc_feature 1..121: note = Description of artificial sequence: synthetic polynucleotide sequence
  source 1..121: mol_type = other DNA
ggatgaaaataaaccccaaaaaggacttttgatggcaaaaagatcaggaatattttctcgagttggatgtggaaggtggtggcccagggggaagcacagtttcaaagaggaccttctaaaa

SEQ ID NO: 1118 - DNA, 360 bp, synthetic construct
  misc_feature 1..360: note = Description of artificial sequence: synthetic polynucleotide sequence
  source 1..360: mol_type = other DNA
atactgcccatttaccaaaaagacacagaccgcgcctctgccctgcccccacatggctcctcaaaaggagaaattgtcttgccacccacgccttccctcgccggggtgctggggggccaacagcaattcaaaaaggctatagagtgggctgagactttggagatgggtagtttggttcaaatctcagcccactaatccctctgagcctgtctcttcatctgaaaaacaggaatacaaatagctgatgtgtaagttagaccaaatggggtaatgcctacgagtcatgtcatttggtacctggcacttgctggacactgtgaattctagttctatatcattgccacggatgaagagaggctg

SEQ ID NO: 1119 - DNA, 360 bp, synthetic construct
  misc_feature 1..360: note = Description of artificial sequence: synthetic polynucleotide sequence
  source 1..360: mol_type = other DNA
ccatgcgcagaaacatgctgagagctgggagaaggtgagctagagggatacagtccctgccctcagggagagctgaagggctctctctcctgccacgggatgatcagggccatcttttccctccatcccgctctggcaatgtggtttggagaaacagtccaatgaaggggcctttgaagcacttcctaagcatctatagacataggaaacttggctctggggatagaggaaggtcccatgccaagattcaagtagatcttggtgtgactgggaggcagctgtggcgttgtggggaaacctagagtcttgggcctgaatttcagctttgacaccctctaatgtaatgggcttcctttgact

SEQ ID NO: 1120 - DNA, 121 bp, synthetic construct
  misc_feature 1..121: note = Description of artificial sequence: synthetic polynucleotide sequence
  source 1..121: mol_type = other DNA
gtaggcttcccacatagctggcaccccacacagaactcccttggccttctgatgatcctgcaggacaatcttttttgttttttgttttttgttttttttttgagatggtatctcactttgt

SEQ ID NO: 1121 - DNA, 480 bp, synthetic construct
  misc_feature 1..480: note = Description of artificial sequence: synthetic polynucleotide sequence
  source 1..480: mol_type = other DNA
aatcttcattctccagaactaatattgggaaaactgatgttcagagaggtcaagtgacttggctaaggcatcacagccagaattcagatgcaagctcctaaaccacatgaccttggacaagccatttcactgaggcgtgtgaacctcctctaagctcaaatgggcataacactctaccctgccttttccccagagctttttgggaactcagatggtgtggaggatggaggcagaagtccactgtgagctgcaaatccttgatcacccaagaggaagtgcttaaggtgcaggcttcagtcttagggaagcaggaagtggggcgctgaaatgtgtattgggggcttctgggagggggtttcttcttgtccaggttgagccaatgacgcagatcttaggccctctggtgactttttgcccaggcaacttctcagtggtggtgatggggagcgtggccagaccatccaagctgccctgctggct

SEQ ID NO: 1122 - DNA, 240 bp, synthetic construct
  misc_feature 1..240: note = Description of artificial sequence: synthetic polynucleotide sequence
  source 1..240: mol_type = other DNA
ctgaggtgatactcctgccttggactcccaaagtgctggaatttctacagatgtgagccaccatgcccggcctatggggcccttcttgttcctatgaagtctgcagggtccccttatgcaaaagaacagaaagctcggcttcacaaagtttgacctcggaagaaatggaagggaaagggtccctttgtcactctcacaaacgtaagaagcaaactaataatgatggccatcacacatatt

SEQ ID NO: 1123 - DNA, 241 bp, synthetic construct
  misc_feature 1..241: note = Description of artificial sequence: synthetic polynucleotide sequence
  source 1..241: mol_type = other DNA
atactcaccatgtagaagctgtgctgccttaaacttctgttcattcagcacttactgattgccagtcccattgctaagggctccgcgtgacttaactcccctaatccttgtgagttgccaattattattcgcattttatagatatggaaactgaggctccaagtggtttaaaaaatgaacttgcccaggttacagtgtgttggtaggtaggggtagtctcaaagttggtaaattttacgcc

SEQ ID NO: 1124 - DNA, 241 bp, synthetic construct
  misc_feature 1..241: note = Description of artificial sequence: synthetic polynucleotide sequence
  source 1..241: mol_type = other DNA
aaagctcacgatacttgccttctttcccttctcaatttatttctctgactgtgtgcttaaccacacagcagtgtcatccagagtttgaagcagagctcatcaataagtgggggtgggctaaatgtctccaggctcctccctgcggtccctcccaccatcccccatctgtgataccacctgtgtctctatgcttgagcccagacaggacaagggtgatcatttcattgggaacattttgact

SEQ ID NO: 1125 - DNA, 241 bp, synthetic construct
  misc_feature 1..241: note = Description of artificial sequence: synthetic polynucleotide sequence
  source 1..241: mol_type = other DNA
ggggggaaagagcaccagcctgggagtcttggcagggggagtgggggagaaggggcaggggcagccaccgacaggctatgaggtcttgtgcaagtcacgtccttcccggggtctcagtcttgtcatctgcagagtgaaggaaagaggtcaagcttgaaggtccctggcagacccaatgccctgtgagaaaactgagtttgggtaacttattattttatagatatggaattatcttatagaa

SEQ ID NO: 1126 - DNA, 239 bp, synthetic construct
  misc_feature 1..239: note = Description of artificial sequence: synthetic polynucleotide sequence
  source 1..239: mol_type = other DNA
atgttatagatatggaatcattttatagatatggcccaaagtccaaagtcacacaactcattcacggagttgctaggatcagtctggagctcttgtcacgagatcacactgcctcaaagaggaggcagattgctgcaatgtaggttcttaataaagagcatgggtggaatgggaggcgggcatcaggcaggagctggggcaaaggtgtcttttctcactgctctgagagaacagatttt

SEQ ID NO: 1127 - DNA, 240 bp, synthetic construct
  misc_feature 1..240: note = Description of artificial sequence: synthetic polynucleotide sequence
  source 1..240: mol_type = other DNA
gtgcctgtgtccctgaccaaggggctgggagaggtggagcatctcacccccaaccatctcccagctttggccctgctccaggaaaagggcggtggccccatctttcagttctgcttcctctagtcatggttggctgggatctcgctgcaagccggttatgtttgggttcctgcagcccccgctcaaccgtcatgaacaagtgggcccagccagtgccccagcttggactggaaagatcat

SEQ ID NO: 1128 - DNA, 121 bp, synthetic construct
  misc_feature 1..121: note = Description of artificial sequence: synthetic polynucleotide sequence
  source 1..121: mol_type = other DNA
tctctgtgacatccgggggtctgtgctgagcctctccccaggcagtgaaagctgtggatgcgtgaaagaaaatgggtctctgggccgggtgtggtggctcacacctgtaatcccagcactt

SEQ ID NO: 1129 - DNA, 241 bp, synthetic construct
  misc_feature 1..241: note = Description of artificial sequence: synthetic polynucleotide sequence
  source 1..241: mol_type = other DNA
gtctcaaaaaaaaaaagaaaaagaaaatgagtctcaggaatggggtggcaagttgagtgtgtgttttctcatgagcttactcttcaatgtattctcttctgggcccagaacagggcagtaggagcctccctctggtcttccagcttcagggccagctctcctcttacctcctccaggaagctccctctgtttctttccagccttcatctgcatgtcatgtgtggtgggttgaaaggtggcc

SEQ ID NO: 1130 - DNA, 121 bp, synthetic construct
  misc_feature 1..121: note = Description of artificial sequence: synthetic polynucleotide sequence
  source 1..121: mol_type = other DNA
ccccaaaagatatgtccatgtcaaatccctggaacctgtcagtgtgactttatttgggaaaagggtctttgcagatagaattaagttaaggggctgggtgcagtggctcatgcctgtaatc

SEQ ID NO: 1131 - DNA, 240 bp, synthetic construct
  misc_feature 1..240: note = Description of artificial sequence: synthetic polynucleotide sequence
  source 1..240: mol_type = other DNA
agcctctgtctcaaaagaaggcaaaaaaagaattaaagatcttgaaatgacatcatcctggattatctaggtgggtcctaaatccaatgacaagtgtctttataagagaaagagacttgctacatgaggagtaggtgatgtggccactaaagctgagtttagagtgatgcagccacaagaccacaagtcaaggatcaccagtagttcccagcagctagaggaggcaaggaagcattctcc

SEQ ID NO: 1132 - DNA, 360 bp, synthetic construct
  misc_feature 1..360: note = Description of artificial sequence: synthetic polynucleotide sequence
  source 1..360: mol_type = other DNA
cctcgagcctccagaggcagcgtggccctgctgacaccttggcttcaacttctggcctccagaaccatgagagaataaagtgctgttgttctgagctacctggatgctggtaccttgtttcagcagccctgggaaatgaatataccatggaaacatggacctgaaccacggatcctggcaggagccttagagccacacagatgagccttcagcttggctttccccagcaagagctacatgatcttgaggaagctgcttgtcttctctgggtctcaagttcttcatctgccaatggagacaataatgcttacttcctaggttttaacagctttattgagatgtaattcacatatacaattt

SEQ ID NO: 1133 - DNA, 241 bp, synthetic construct
  misc_feature 1..241: note = Description of artificial sequence: synthetic polynucleotide sequence
  source 1..241: mol_type = other DNA
gattgcacccctgcactccagcctgggtgacagagactccgtcttaaaaaaaaaaaaaaaaaaaaaaaaaaaaaagtagagttcagtgttcttttgggaatactcagagagttgtgtgaccatctcccatccccacagtcaattttagcacatttcatcaccccctaaagaaactccagacccatcagcagttgttccccatttccttccaaaatccctctctgccaagccctaggcaacc

SEQ ID NO: 1134 - DNA, 360 bp, synthetic construct
  misc_feature 1..360: note = Description of artificial sequence: synthetic polynucleotide sequence
  source 1..360: mol_type = other DNA
gggatttcaggcatgagccaccacgccccacccctcctactttatgtctccatggatttgcctgttttggtcatttcaaataaatagaatcatacaatatgtgaccctttgtgtccggcttcttcacttagcattttttttaaggttcatccatgttccagcatgtatcagtgctttctccctttaatggtggaatactttattgtatagataagcaacattttgtttatccatttattttttggtggatatttgggctgtttttatattttggctattttgaattatccttctgtgaacattcgtgtataggtttttgtgtggatatatctggtttttcttgttttcttttgttttatt

SEQ ID NO: 1135 - DNA, 480 bp, synthetic construct
  misc_feature 1..480: note = Description of artificial sequence: synthetic polynucleotide sequence
  source 1..480: mol_type = other DNA
aatacataatatgatacatatttatggggtatatgtgaatatttattacatgcatagaaggtataatgatcatgtcaggatatttgaggtatccacatttgggattgtttaaagattaaatgaaatagtgttaaaagtatttaatatgcccttcaacaaatgatgaggaaatcttagaatctgctcagactccttcagtttacatattaggaaactgaggcacagaaaggagcagagacttgctcaagtccacccaaagcagtagagcattgtggttaaatgcaggacttcagtcagactgtctgggttcaaatcctggttccacttggacatgggtttccttacataaatcacttcacctctctgagcctcagttttctcatatgcaaagtgaggataataataataccttccttacatggttactgatatgagtattaaatgtgccagctcatgtgcctggcgtataggaggtgcttt

SEQ ID NO: 1136 - DNA, 481 bp, synthetic construct
  misc_feature 1..481: note = Description of artificial sequence: synthetic polynucleotide sequence
  source 1..481: mol_type = other DNA
ataaaccttagctgttaccactcatggcattgccaaatgtgggacgggtctcctgactctctggtgtgagattgatggaatccacactttccagttcccttttctacctcctgggtatcttctcatatggttgtaagttccttggaggaagggaatgtggcttgctctctccaccacgctgagcatataagaggtgctgaatgagcgcttttattcactcctctcatccccagccctcaccagctgggagttgttgtaggtgtcaattttctgcctctttccaacaccctgtgaggtgactgagcattgtcttccctcccaggcagctcacagtgtgccaccatggagttggggcccctagaaggtggctacctggagcttcttaacagcgatgctgaccccctgtgcctctaccacttctatgaccagatggacctggctggagaagaagagattgagctctactcaggtgggccctcct

SEQ ID NO: 1137 - DNA, 121 bp, synthetic construct
  misc_feature 1..121: note = Description of artificial sequence: synthetic polynucleotide sequence
  source 1..121: mol_type = other DNA
cttttcctcccagaacccgacacagacaccatcaactgcgaccagttcagcaggctgttgtgtgacatggaaggtgatgaagagaccagggaggcttatgccaatatcggtgaggaagcac

SEQ ID NO: 1138 - DNA, 121 bp, synthetic construct
  misc_feature 1..121: note = Description of artificial sequence: synthetic polynucleotide sequence
  source 1..121: mol_type = other DNA
attgactgcgcttttccttgtctgggcagcggaactggaccagtatgtcttccaggactcccagctggagggcctgagcaaggacattttcagtaagtttgtggtgggtggggaggtcttg

SEQ ID NO: 1139 - DNA, 121 bp, synthetic construct
  misc_feature 1..121: note = Description of artificial sequence: synthetic polynucleotide sequence
  source 1..121: mol_type = other DNA
tctctggtttttctcaaagtagagcacataggaccagatgaagtgatcggtgagagtatggagatgccagcagaagttgggcagaaaagtcagaaaagacgtgagtgagcccctccctgat

SEQ ID NO: 1140 - DNA, 121 bp, synthetic construct
  misc_feature 1..121: note = Description of artificial sequence: synthetic polynucleotide sequence
  source 1..121: mol_type = other DNA
ctctccctggggcagctgatcacatgttttctctgcagccttcccagaggagcttccggcagacctgaagcactggaagccaggtgtgcagggcaggtgggctggggttgggaagggtgga

SEQ ID NO: 1141 - DNA, 148 bp, synthetic construct
  misc_feature 1..148: note = Description of artificial sequence: synthetic polynucleotide sequence
  source 1..148: mol_type = other DNA
gctgagccccccactgtggtgactggcagtctcctagtgagaccagtgagcgactgctccaccctgccctgcctgccactgcctgcgctgttcaaccaggagccagcctccggccagatgcgcctggagaaaaccgaccagattccca

SEQ ID NO: 1142 - DNA, 145 bp, synthetic construct
  misc_feature 1..145: note = Description of artificial sequence: synthetic polynucleotide sequence
  source 1..145: mol_type = other DNA
gtgcctttctccagttcctcgttgagctgcctgaatctccctgagggacccatccagtttgtccccaccatctccactctgccccatgggctctggcaaatctctgaggctggaacaggggtctccagtatattcatctaccatg

SEQ ID NO: 1143 - DNA, 166 bp, synthetic construct
  misc_feature 1..166: note = Description of artificial sequence: synthetic polynucleotide sequence
  source 1..166: mol_type = other DNA
ggtgaggtgccccaggccagccaagtaccccctcccagtggattcactgtccacggcctcccaacatctccagaccggccaggctccaccagccccttcgctccatcagccactgacctgcccagcatgcctgaacctgccctgacctcccgagcaaacatgacag

SEQ ID NO: 1144 - DNA, 121 bp, synthetic construct
  misc_feature 1..121: note = Description of artificial sequence: synthetic polynucleotide sequence
  source 1..121: mol_type = other DNA
tctggcacctgcttctccatctccagagcacaagacgtcccccacccaatgcccggcagctggagaggtctccaacaagcttccaaaatggcctggtgagtgatgcgggatctctctgccc

SEQ ID NO: 1145 - DNA, 353 bp, synthetic construct
  misc_feature 1..353: note = Description of artificial sequence: synthetic polynucleotide sequence
  source 1..353: mol_type = other DNA
gagccggtggagcagttctaccgctcactgcaggacacgtatggtgccgagcccgcaggcccggatggcatcctagtggaggtggatctggtgcaggccaggctggagaggagcagcagcaagagcctggagcgggaactggccaccccggactgggcagaacggcagctggcccaaggaggcctggctgaggtgctgttggctgccaaggagcaccggcggccgcgtgagacacgagtgattgctgtgctgggcaaagctggtcagggcaagagctattgggctggggcagtgagccgggcctgggcttgtggccggcttccccagtacgactttgtcttctctgtcccctg

SEQ ID NO: 1146 - DNA, 470 bp, synthetic construct
  misc_feature 1..470: note = Description of artificial sequence: synthetic polynucleotide sequence
  source 1..470: mol_type = other DNA
ccattgcttgaaccgtccgggggatgcctatggcctgcaggatctgctcttctccctgggcccacagccactcgtggcggccgatgaggttttcagccacatcttgaagagacctgaccgcgttctgctcatcctagacggcttcgaggagctggaagcgcaagatggcttcctgcacagcacgtgcggaccggcaccggcggagccctgctccctccgggggctgctggccggccttttccagaagaagctgctccgaggttgcaccctcctcctcacagcccggccccggggccgcctggtccagagcctgagcaaggccgacgccctatttgagctgtccggcttctccatggagcaggcccaggcatacgtgatgcgctactttgagagctcagggatgacagagcaccaagacagagccctgacgctcctccgggaccggccacttcttctcagtcacagccaca

SEQ ID NO: 1147 - DNA, 472 bp, synthetic construct
  misc_feature 1..472: note = Description of artificial sequence: synthetic polynucleotide sequence
  source 1..472: mol_type = other DNA
gccctactttgtgccgggcagtgtgccagctctcagaggccctgctggagcttggggaggacgccaagctgccctccacgctcacgggactctatgtcggcctgctgggccgtgcagccctcgacagcccccccggggccctggcagagctggccaagctggcctgggagctgggccgcagacatcaaagtaccctacaggaggaccagttcccatccgcagacgtgaggacctgggcgatggccaaaggcttagtccaacacccaccgcgggccgcagagtccgagctggccttccccagcttcctcctgcaatgcttcctgggggccctgtggctggctctgagtggcgaaatcaaggacaaggagctcccgcagtacctagcattgaccccaaggaagaagaggccctatgacaactggctggagggcgtgccacgctttctggctgggctgatcttccagcctcccgc

SEQ ID NO: 1148 - DNA, 357 bp, synthetic construct
  misc_feature 1..357: note = Description of artificial sequence: synthetic polynucleotide sequence
  source 1..357: mol_type = other DNA
ccgctgcctgggagccctactcgggccatcggcggctgcctcggtggacaggaagcagaaggtgcttgcgaggtacctgaagcggctgcagccggggacactgcgggcgcggcagctgctggagctgctgcactgcgcccacgaggccgaggaggctggaatttggcagcacgtggtacaggagctccccggccgcctctcttttctgggcacccgcctcacgcctcctgatgcacatgtactgggcaaggccttggaggcggcgggccaagacttctccctggacctccgcagcactggcatttgcccctctggattggggagcctcgtgggactcagctgtgtcacccgtttcag

SEQ ID NO: 1149 - DNA, 206 bp, synthetic construct
  misc_feature 1..206: note = Description of artificial sequence: synthetic polynucleotide sequence
  source 1..206: mol_type = other DNA
ggtctagcctggtcaccgtgcctgggtctgaggccctccctccacagggctgccttgagcgacacggtggcgctgtgggagtccctgcagcagcatggggagaccaagctacttcaggcagcagaggagaagttcaccatcgagcctttcaaagccaagtccctgaaggatgtggaagacctgggaaagcttgtgcagactcagag

SEQ ID NO: 1150 - DNA, 121 bp, synthetic construct
  misc_feature 1..121: note = Description of artificial sequence: synthetic polynucleotide sequence
  source 1..121: mol_type = other DNA
ccctaacattgcctgttctctccaggacgagaagttcctcggaagacacagctggggagctccctgctgttcgggacctaaagaaactggagtttgcgtaagcaaaggggtggattgtctt

SEQ ID NO: 1151 - DNA, 360 bp, synthetic construct
  misc_feature 1..360: note = Description of artificial sequence: synthetic polynucleotide sequence
  source 1..360: mol_type = other DNA
taacatggtcattcccatcactcattcaacagaggtattgagcacttgaatgactgaggctgctgtcctcatgagctgacagtctaatcaactcccctctggaggaggtcagggggacttcctggaggaggtgatatctgcactgaagcttcagtgaggataaggaatgagctgagtggggagaggggagtaagaaaggctttccaggaattgtaatttcgccagggatcagaaaaggcccaatgtgtccccaaccttccataggaggatgccactatgactatggagtccttttccctcctgtggccaggaactgcacaacgtcccttgtgcctgagcttgtttacttccacagccaag

SEQ ID NO: 1152 - DNA, 361 bp, synthetic construct
  misc_feature 1..361: note = Description of artificial sequence: synthetic polynucleotide sequence
  source 1..361: mol_type = other DNA
ggatggcctccccagggagaatctttcccccattttgaaattcccaggagcttttgatgtgcagctaggatgaaaaagcaaccctacttgcctgggactatcctggtttgaaaactgaaagtcttgcatcccaagaagccccttagtcccaggcaaactgggacagttggttgctctatgtgtggccagggctgggggccacaccctaggcagtgttgctggggtgacagaaatggagacctaggcaaggctctagggagtccagttgtgtctgggtcactgaggaggggcagcccaccatacatgggccccaagaaagcacaataattattatatttagatctgtcagaatatagctttt

SEQ ID NO: 1153 - DNA, 121 bp, synthetic construct
  misc_feature 1..121: note = Description of artificial sequence: synthetic polynucleotide sequence
  source 1..121: mol_type = other DNA
tctttccttcttttctttctttcctttctctcctttctctttctttctttccattctctttctttctctttccttccctcccttccttctcttccttccttctttttcctttccttttctt

SEQ ID NO: 1154 - DNA, 121 bp, synthetic construct
  misc_feature 1..121: note = Description of artificial sequence: synthetic polynucleotide sequence
  source 1..121: mol_type = other DNA
ccttgctctttgcctcctaggctgggccctgtctcaggcccccaggctttccccaaactggtgcggatcctcacggccttttcctccctgcagcatctggagtgagtatagactctgggac

SEQ ID NO: 1155 - DNA, 121 bp, synthetic construct
  misc_feature 1..121: note = Description of artificial sequence: synthetic polynucleotide sequence
  source 1..121: mol_type = other DNA
gattccacctgcagcctggatgcgctgagtgagaacaagatcggggacgagggtgtctcgcagctctcagccaccttcccccagctgaagtccttggaaaccctcaagtgagtgagctggg

SEQ ID NO: 1156 - DNA, 121 bp, synthetic construct
  misc_feature 1..121: note = Description of artificial sequence: synthetic polynucleotide sequence
  source 1..121: mol_type = other DNA
tcactgtgtccccgcagtctgtcccagaacaacatcactgacctgggtgcctacaaactcgccgaggccctgccttcgctcgctgcatccctgctcaggctaaggtgagtggggccccgga

SEQ ID NO: 1157 - DNA, 121 bp, synthetic construct
  misc_feature 1..121: note = Description of artificial sequence: synthetic polynucleotide sequence
  source 1..121: mol_type = other DNA
tggcctctgtttccgacagcttgtacaataactgcatctgcgacgtgggagccgagagcttggctcgtgtgcttccggacatggtgtccctccgggtgatggagtgagtgtgggagtctgg

SEQ ID NO: 1158 - DNA, 121 bp, synthetic construct
  misc_feature 1..121: note = Description of artificial sequence: synthetic polynucleotide sequence
  source 1..121: mol_type = other DNA
ggtgagtttctcttgccagcgtccagtacaacaagttcacggctgccggggcccagcagctcgctgccagccttcggaggtgtcctcatgtggagacgctggcgtaagtccaggcaaccct

SEQ ID NO: 1159 - DNA, 121 bp, synthetic construct
  misc_feature 1..121: note = Description of artificial sequence: synthetic polynucleotide sequence
  source 1..121: mol_type = other DNA
ctgagtcccatccccccttgcaggatgtggacgcccaccatcccattcagtgtccaggaacacctgcaacaacaggattcacggatcagcctgagatgatcccagctgtgctctggacagg

SEQ ID NO: 1160 - DNA, 309 bp, synthetic construct
  misc_feature 1..309: note = Description of artificial sequence: synthetic polynucleotide sequence
  source 1..309: mol_type = other DNA
gtcaaatctggaaggggaaggagctcaggtagtcgcggaggacggggttgagggggatgcgagccaggttctcgcggcccacggtggccacgatgcgctggcggcacagctcctgcagcggccgcacgcggcgctggcgcagcggggcccccagcatgcggcgcggcgccgccacgtagtgctccagcagctcgaagaggcagtcgaagctctcgcggctgccatccaggtgaaagcggccggcctgaaagtgcacgcggatgctcgtgggtcccgaggccatcttcacgctaagggcgaaaaagcagt

SEQ ID NO: 1161 - DNA, 328 bp, synthetic construct
  misc_feature 1..328: note = Description of artificial sequence: synthetic polynucleotide sequence
  source 1..328: mol_type = other DNA
tccgctggcggctgtcgcgcaccaggaaggtgcccacgggctcggcgcgcagccgctcgtgcgccccgtgcacgctcaggggcccccagtagaatccgcaggcgtccaggagcgcgctggcgcgcgtgatgcgccggtaatcggcgtgcgaacggaatgtgcggaagtgcgtgtcgccgggggccggggccgggaccgcggggcacggccgcgggcgcgcgggggccgcgggcgaggaggaggaagaggaggaaggttctggccgccgtcggggctctgctgctgtggagactgcattgtcggctgccacctggttgtgtgctaccat

SEQ ID NO: 1162 - DNA, 121 bp, synthetic construct
  misc_feature 1..121: note = Description of artificial sequence: synthetic polynucleotide sequence
  source 1..121: mol_type = other DNA
ctctgcaggtgccttggcatctcccaatggggtggctttgctctgggctcctgttccctgtgagctgcctggtcctgctgcaggtggcaagctctggtaagtcaccacttctcaatcattc

SEQ ID NO: 1163 - DNA, 121 bp, synthetic construct
  misc_feature 1..121: note = Description of artificial sequence: synthetic polynucleotide sequence
  source 1..121: mol_type = other DNA
agatttctgacctaaactactgggaaggacgcggttgtcatttctgaaatgcagaaggatgccagaagagaaggtactttggggaggggcgggaatcaggagttagttttggacatgagat

SEQ ID NO: 1164 - DNA, 140 bp, synthetic construct
  misc_feature 1..140: note = Description of artificial sequence: synthetic polynucleotide sequence
  source 1..140: mol_type = other DNA
gggaacatgaaggtcttgcaggagcccacctgcgtctccgactacatgagcatctctacttgcgagtggaagatgaatggtcccaccaattgcagcaccgagctccgcctgttgtaccagctggtttttctgctctccga

SEQ ID NO: 1165 - DNA, 153 bp, synthetic construct
  misc_feature 1..153: note = Description of artificial sequence: synthetic polynucleotide sequence
  source 1..153: mol_type = other DNA
gagcccacacgtgtatccctgagaacaacggaggcgcggggtgcgtgtgccacctgctcatggatgacgtggtcagtgcggataactatacactggacctgtgggctgggcagcagctgctgtggaagggctccttcaagcccagcgagcatg

SEQ ID NO: 1166 - DNA, 153 bp, synthetic construct
  misc_feature 1..153: note = Description of artificial sequence: synthetic polynucleotide sequence
  source 1..153: mol_type = other DNA
gtgaaacccagggccccaggaaacctgacagttcacaccaatgtctccgacactctgctgctgacctggagcaacccgtatccccctgacaattacctgtataatcatctcacctatgcagtcaacatttggagtgaaaacgacccggcagat

SEQ ID NO: 1167 - DNA, 158 bp, synthetic construct
  misc_feature 1..158: note = Description of artificial sequence: synthetic polynucleotide sequence
  source 1..158: mol_type = other DNA
gttcagaatctataacgtgacctacctagaaccctccctccgcatcgcagccagcaccctgaagtctgggatttcctacagggcacgggtgagggcctgggctcagtgctataacaccacctggagtgagtggagccccagcaccaagtggcacaact

SEQ ID NO: 1168 - DNA, 121 bp, synthetic construct
  misc_feature 1..121: note = Description of artificial sequence: synthetic polynucleotide sequence
  source 1..121: mol_type = other DNA
cccacttccagcctacagggagcccttcgagcagcacctcctgctgggcgtcagcgtttcctgcattgtcatcctggccgtctgcctgttgtgctatgtcagcatcaccaagtgagtcctg

SEQ ID NO: 1169 - DNA, 121 bp, synthetic construct
  misc_feature 1..121: note = Description of artificial sequence: synthetic polynucleotide sequence
  source 1..121: mol_type = other DNA
ccttttccttttgtttttcaggattaagaaagaatggtgggatcagattcccaacccagcccgcagccgcctcgtggctataataatccaggatgctcaggtaggagtaggcgtggatgag

SEQ ID NO: 1170 - DNA, 121 bp, synthetic construct
  misc_feature 1..121: note = Description of artificial sequence: synthetic polynucleotide sequence
  source 1..121: mol_type = other DNA
cactctgctctttcattggctgtctctgtattttaggggtcacagtgggagaagcggtcccgaggccaggaaccagccaagtgcccgtatgtatctgaacttaggtcacagcctgcatgca

SEQ ID NO: 1171 - DNA, 336 bp, synthetic construct
  misc_feature 1..336: note = Description of artificial sequence: synthetic polynucleotide sequence
  source 1..336: mol_type = other DNA
gacactggaagaattgtcttaccaagctcttgccctgttttctggagcacaacatgaaaagggatgaagatcctcacaaggctgccaaagagatgcctttccagggctctggaaaatcagcatggtgcccagtggagatcagcaagacagtcctctggccagagagcatcagcgtggtgcgatgtgtggagttgtttgaggccccggtggagtgtgaggaggaggaggaggtagaggaagaaaaagggagcttctgtgcatcgcctgagagcagcagggatgacttccaggagggaagggagggcattgtggcccggctaacagagagcctgttcc

SEQ ID NO: 1172 - DNA, 450 bp, synthetic construct
  misc_feature 1..450: note = Description of artificial sequence: synthetic polynucleotide sequence
  source 1..450: mol_type = other DNA
tggacctgctcggagaggagaatgggggcttttgccagcaggacatgggggagtcatgccttcttccaccttcgggaagtacgagtgctcacatgccctgggatgagttcccaagtgcagggcccaaggaggcacctccctggggcaaggagcagcctctccacctggagccaagtcctcctgccagcccgacccagagtccagacaacctgacttgcacagagacgcccctcgtcatcgcaggcaaccctgcttaccgcagcttcagcaactccctgagccagtcaccgtgtcccagagagctgggtccagacccactgctggccagacacctggaggaagtagaacccgagatgccctgtgtcccccagctctctgagccaaccactgtgccccaacctgagccagaaacctgggagcagatcctccgccgaaatgtcctccagcatg

SEQ ID NO: 1173 - DNA, 449 bp, synthetic construct
  misc_feature 1..449: note = Description of artificial sequence: synthetic polynucleotide sequence
  source 1..449: mol_type = other DNA
gggcagctgcagcccccgtctcggcccccaccagtggctatcaggagtttgtacatgcggtggagcagggtggcacccaggccagtgcggtggtgggcttgggtcccccaggagaggctggttacaaggccttctcaagcctgcttgccagcagtgctgtgtccccagagaaatgtgggtttggggctagcagtggggaagaggggtataagcctttccaagacctcattcctggctgccctggggaccctgccccagtccctgtccccttgttcacctttggactggacagggagccacctcgcagtccgcagagctcacatctcccaagcagctccccagagcacctgggtctggagccgggggaaaaggtagaggacatgccaaagcccccacttccccaggagcaggccacagacccccttgtggacagcctgggcagtggcatt

SEQ ID NO: 1174 - DNA, 345 bp, synthetic construct
  misc_feature 1..345: note = Description of artificial sequence: synthetic polynucleotide sequence
  source 1..345: mol_type = other DNA
gtctactcagcccttacctgccacctgtgcggccacctgaaacagtgtcatggccaggaggatggtggccagacccctgtcatggccagtccttgctgtggctgctgctgtggagacaggtcctcgccccctacaacccccctgagggccccagacccctctccaggtggggttccactggaggccagtctgtgtccggcctccctggcaccctcgggcatctcagagaagagtaaatcctcatcatccttccatcctgcccctggcaatgctcagagctcaagccagacccccaaaatcgtgaactttgtctccgtgggacccacatacatgagggtctcttag

SEQ ID NO: 1175 - DNA, 121 bp, synthetic construct
  misc_feature 1..121: note = Description of artificial sequence: synthetic polynucleotide sequence
  source 1..121: mol_type = other DNA
tgaagggtttcaggtggttaaagtgggggccaatggagaggtggagacactagaacaaggggaacttccaccccaggaagatcctagttggcaaaaagacccagactatcagccaccagcc

SEQ ID NO: 1176 - DNA, 121 bp, synthetic construct
  misc_feature 1..121: note = Description of artificial sequence: synthetic polynucleotide sequence
  source 1..121: mol_type = other DNA
acaaagaaaaccaaaaagagcaaactgcgttatacagaggagggcaaagatgtagatgtgtctgtctacgattttgaggaagaacagcaggagggtctgctatcagaggttaatgcagaga

SEQ ID NO: 1177 - DNA, 121 bp, synthetic construct
  misc_feature 1..121: note = Description of artificial sequence: synthetic polynucleotide sequence
  source 1..121: mol_type = other DNA
agcagcgagtcgtcccccgtgtcctctccggccaccaaccacagctcccccgccagcacacccaagcgcgtgcccatgggccctatcatcgtcccccctgggggccacagcgtgcccagca

SEQ ID NO: 1178 - DNA, 121 bp, synthetic construct
  misc_feature 1..121: note = Description of artificial sequence: synthetic polynucleotide sequence
  source 1..121: mol_type = other DNA
cgtggtgaccatcgctccaaccaaaaccgtgaatggtgtctggaggagtgagagccggcaggtgagtggggcggggcagggagcctagcgtcctctaagtggggaggctggattcaggcat

SEQ ID NO: 1179 - DNA, 121 bp, synthetic construct
  misc_feature 1..121: note = Description of artificial sequence: synthetic polynucleotide sequence
  source 1..121: mol_type = other DNA
ggaacaagaagtggagaatgtcagtctgagtcaggcccttctgtcttgaacatgagttttttatggcgggaggtagactgaccctttttggacttcaggtggctgtaggagacagaagcag

SEQ ID NO: 1180 - DNA, 121 bp, synthetic construct
  misc_feature 1..121: note = Description of artificial sequence: synthetic polynucleotide sequence
  source 1..121: mol_type = other DNA
cactcacctggagtgagccctgctcccccctggctccttcccagcctgggcatccttgagttccaaggcctcattcagctctcggaacatctcgaagcgctcacgcccacggatctgcagc

SEQ ID NO: 1181 - DNA, 121 bp, synthetic construct
  misc_feature 1..121: note = Description of artificial sequence: synthetic polynucleotide sequence
  source 1..121: mol_type = other DNA
ttacgacgagtttatcaggaagtaacaccatcgtaagtcaagtagcatctgtatcaggcaaagtcatagaaccattttcatgctctctttaacaattttctttttgaaagctggtctggtc

SEQ ID NO: 1182 - DNA, 121 bp, synthetic construct
  misc_feature 1..121: note = Description of artificial sequence: synthetic polynucleotide sequence
  source 1..121: mol_type = other DNA
ataagaggtcccaagacttagtacctgaagggtgaaatattctccatccagtggtttcttctttggctggggagaggagctggtgttgttgggcagtgctaggaaagaggcaaggaaaggt

SEQ ID NO: 1183 - DNA, 138 bp, synthetic construct
  misc_feature 1..138: note = Description of artificial sequence: synthetic polynucleotide sequence
  source 1..138: mol_type = other DNA
cctcgcttagtgctccctgggggcagctcgtggtgaggctcccctttcttgcggagattctcttcctctgtgcgccggtctctcccaggacaggcacaaacacgcacctcaaagctgttccgtcccagtagattacca

SEQ ID NO: 1184 - DNA, 121 bp, synthetic construct
  misc_feature 1..121: note = Description of artificial sequence: synthetic polynucleotide sequence
  source 1..121: mol_type = other DNA
cctgacctggagtcttccagtgtgatgatggtgaggatgggcctccggttcatgccgcccatgcaggaactgttacacatgtagttgtagtggatggtggtacagtcagagccaacctagg

SEQ ID NO: 1185 - DNA, 121 bp, synthetic construct
  misc_feature 1..121: note = Description of artificial sequence: synthetic polynucleotide sequence
  source 1..121: mol_type = other DNA
agacctcaggcggctcatagggcaccaccacactatgtcgaaaagtgtttctgtcatccaaatactccacacgcaaatttccttccactcggataagatgctgaggaggggccagacctaa

SEQ ID NO: 1186 - DNA, 185 bp, synthetic construct
  misc_feature 1..185: note = Description of artificial sequence: synthetic polynucleotide sequence
  source 1..185: mol_type = other DNA
ccatcgctatctgagcagcgctcatggtgggggcagcgcctcacaacctccgtcatgtgctgtgactgcttgtagatggccatggcgcggacgcgggtgccgggcgggggtgtggaatcaacccacagctgcacagggcaggtcttggccagttggcaaaacatcttgttgagggcaggggagta

SEQ ID NO: 1187 - DNA, 280 bp, synthetic construct
  misc_feature 1..280: note = Description of artificial sequence: synthetic polynucleotide sequence
  source 1..280: mol_type = other DNA
ccgtgcaagtcacagacttggctgtcccagaatgcaagaagcccagacggaaaccgtagctgccctggtaggttttctgggaagggacagaagatgacaggggccaggagggggctggtgcaggggccgccggtgtaggagctgctggtgcaggggccacggggggagcagcctctggcattctgggagcttcatctggacctgggtcttcagtgaaccattgttcaatatcgtccggggacagcatcaaatcatccattgcttgggacggcaaggggga

SEQ ID NO: 1188 - DNA, 121 bp, synthetic construct
  misc_feature 1..121: note = Description of artificial sequence: synthetic polynucleotide sequence
  source 1..121: mol_type = other DNA
ccctccaggtccccagccctccaggtccccagcccaacccttgtccttaccagaacgttgttttcaggaagtctgaaagacaagagcagaaagtcagtcccatggaattttcgcttcccac

SEQ ID NO: 1189 - DNA, 121 bp, synthetic construct
  misc_feature 1..121: note = Description of artificial sequence: synthetic polynucleotide sequence
  source 1..121: mol_type = other DNA
tgcccttccaatggatccactcacagtttccataggtctgaaaatgtttcctgactcagagggggctcgacgctaggatctgactgcggctcctccatggcagtgacccggaaggcagtct

SEQ ID NO: 1190 - DNA, 167 bp, synthetic construct
  misc_feature 1..167: note = Description of artificial sequence: synthetic polynucleotide sequence
  source 1..167: mol_type = other DNA
gatgtccagcaaagctgagaagaagcagcgattgagtggccgaggaagctcccaggcaagctggtcagggcgggccactcgggctgctgtggccacacaggagcaggggaatgccccggctgtcagtgagccagagctgcaggctgagctccccaaggaggagcctg

SEQ ID NO: 1191 - DNA, 121 bp, synthetic construct
  misc_feature 1..121: note = Description of artificial sequence: synthetic polynucleotide sequence
  source 1..121: mol_type = other DNA
ccttcctttttgtatgtttattcttcctagagccacggttggagggacctcaagcacagagtgaagaatcagtggagcccgaggcagatgtggtaggcttgggtcttccctgtggcagata

SEQ ID NO: 1192 - DNA, 172 bp, synthetic construct
  misc_feature 1..172: note = Description of artificial sequence: synthetic polynucleotide sequence
  source 1..172: mol_type = other DNA
gaagcccctcttcctttcccgagctgcgctgacaggactggcggatgcagtgtggacacaggagcatgatgccattctggaacactttgcccaggaccctacagaatccatcctcaccatcttcattgacccttgttttgggctgaagctagagctgggcatgcctgtacag

SEQ ID NO: 1193 - DNA, 230 bp, synthetic construct
  misc_feature 1..230: note = Description of artificial sequence: synthetic polynucleotide sequence
  source 1..230: mol_type = other DNA
gacccagaaccagcttgtctacttcattcgccaagcaccagttcccatcacctgggagaacttcgaggcaactgtgcagtttgggacggtgcggggcccctatatcccggccctgcttcggctgctcggtggagtctttgcccctcagatctttgcaaacacaggctggcctgagagcattagaaatcattttgcttctcatctgcacaagttcttggcctgcctgacag

SEQ ID NO: 1194 - DNA, 121 bp, synthetic construct
  misc_feature 1..121: note = Description of artificial sequence: synthetic polynucleotide sequence
  source 1..121: mol_type = other DNA
cttagacactcggtacaaactggaggggcacacggtcctctacatccctgcagaggccatgaacatgaagcctgagatggtgataaaggacaaagagctggtgcaacggctagagagtgag

SEQ ID NO: 1195 - DNA, 240 bp, synthetic construct
  misc_feature 1..240: note = Description of artificial sequence: synthetic polynucleotide sequence
  source 1..240: mol_type = other DNA
gcctccatgatccactggacccggcagataaaggagatgctcagtgcccaggagactgtggagacaggagaaaatttaggtcctctggaggagattgagttctggcgcaaccgatgcatggacctgtctggcatcagtaagcagctggtgaagaagggagtgaagcacgttgaatccatcctgcaccttgccaagtcgtcctacttggcgccctttatgaaactggcacagcagatccag

SEQ ID NO: 1196 - DNA, 193 bp, synthetic construct
  misc_feature 1..193: note = Description of artificial sequence: synthetic polynucleotide sequence
  source 1..193: mol_type = other DNA
ggatggctctcgtcaagcacagtcaaacctgacctttttgtcaatcctgaaggaaccttaccaggagttggctttcatgaagcccaaggacatctctagcaagctccctaagctgatcagtctcatccgcatcatctgggtcaactctccccactacaacactcgggagagactgacctcgctcttccgaaag

SEQ ID NO: 1197 - DNA, 207 bp, synthetic construct
  misc_feature 1..207: note = Description of artificial sequence: synthetic polynucleotide sequence
  source 1..207: mol_type = other DNA
ggtatgtgactgtcagtatcacttcgcccgctgggaagatggcaagcagggtccccttccttgcttctttggtgcccaggggccacagataacacggaacttgctggagattgaggacatctttcataaaaatctgcacacgctgcgagccgttcgcgggggtatcctggatgtcaagaacacctgttggcatgaagactacaataa

SEQ ID NO: 1198 - DNA, 121 bp, synthetic construct
  misc_feature 1..121: note = Description of artificial sequence: synthetic polynucleotide sequence
  source 1..121: mol_type = other DNA
cgtgccggaatcaaggacctggaggtgatgacccagaacctgatcacctcagccttcgagttggtgcgggacgtgccgcacggcgtgcttctgctggacaccttccacaggcttgcctccc

SEQ ID NO: 1199 - DNA, 184 bp, synthetic construct
  misc_feature 1..184: note = Description of artificial sequence: synthetic polynucleotide sequence
  source 1..184: mol_type = other DNA
ggctatcaagcggacttatgacaagaaggcggtggatctctacatgctgttcaatagcgagctggccctggtgaaccgtgaacggaacaagaaatggccagacctggagccctacgtggcccagtattccggaaaggcgcgctgggtgcacatcctccggcgtcgcatcgacagagtcatgacc

SEQ ID NO: 1200 - DNA, 216 bp, synthetic construct
  misc_feature 1..216: note = Description of artificial sequence: synthetic polynucleotide sequence
  source 1..216: mol_type = other DNA
gtgccttgctggtgctcatttcctgccccgtattgggactggaaaggagagtgtgcacacctatcagcagatggtccaggccattgatgagctggttcgaaaaaccttccaagagtggacatcaagtctggacaaggattgcattcggcggttggataccccattgctgcgaatcagccaggagaaggcgggcatgctggatgtcaactttgacaa

SEQ ID NO: 1201 - DNA, 148 bp, synthetic construct
  misc_feature 1..148: note = Description of artificial sequence: synthetic polynucleotide sequence
  source 1..148: mol_type = other DNA
ggtcccttctgattctctttgcggaaattgactactgggagcggctgctgtttgagacgccccattacgtggtgaacgtagctgagcgagccgaggacctgcgcattctgcgtgaaaatctgctactcgttgctagagactacaatag

SEQ ID NO: 1202 - DNA, 158 bp, synthetic construct
  misc_feature 1..158: note = Description of artificial sequence: synthetic polynucleotide sequence
  source 1..158: mol_type = other DNA
ggattattgccatgctgtccccagatgagcaggccctattcaaagagcgtattcggctcctggataagaagatccacccgggactcaagaaactgcactgggccttgaagggggccagtgccttcttcatcacggagtgccgtatacatgccagcaag

SEQ ID NO: 1203 - DNA, 241 bp, synthetic construct
  misc_feature 1..241: note = Description of artificial sequence: synthetic polynucleotide sequence
  source 1..241: mol_type = other DNA
ggtgcagatgattgtgaatgagttcaaggcatccactctgaccattggctggcgagcccaagagatgtcagagaagctgctggtacgcattagtggcaaacgggtatacagggacctggaatttgaagaggaccaaagagagcatcgggcagctgtacagcagaaattgatgaacctgcaccaggatgtggtgaccatcatgaccaactcctatgaggtcttcaagaatgatggtcctgag

SEQ ID NO: 1204 - DNA, 190 bp, synthetic construct
  misc_feature 1..190: note = Description of artificial sequence: synthetic polynucleotide sequence
  source 1..190: mol_type = other DNA
gattcagcagcagtggatgctgtacatgattcggctggaccgcatgatggaggatgccctgcgcctgaatgtgaagtggtcactgctagaactatccaaggctatcaacggggatggaaagaccagcccaaacccactcttccaagtccttgtcattttgaagaatgatctgcaaggaagtgtggcacag

SEQ ID NO: 1205 - DNA, 149 bp, synthetic construct
  misc_feature 1..149: note = Description of artificial sequence: synthetic polynucleotide sequence
  source 1..149: mol_type = other DNA
ggtggaattctcacccactctgcagactttggcaggtgtggtcaatgacattggcaaccacctcttttccaccatctctgtcttctgccacctccctgacattctcaccaagcgcaagttacatcgtgaacccatccaaacagttgtgg

SEQ ID NO: 1206 - DNA, 194 bp, synthetic construct
  misc_feature 1..194: note = Description of artificial sequence: synthetic polynucleotide sequence
  source 1..194: mol_type = other DNA
gagcaagatgaggacatcaagaagatccagacccaaatcagcagcggcatgactaacaacgcaagcctgctgcagaactacctcaagacctgggacatgtaccgggagatctgggagatcaacaaggactccttcattcatcgctaccagcgcctcaaccctcctgtctcttcttttgttgccgacattgcccg

SEQ ID NO: 1207 - DNA, 202 bp, synthetic construct
  misc_feature 1..202: note = Description of artificial sequence: synthetic polynucleotide sequence
  source 1..202: mol_type = other DNA
gctacacggaagttgctaataacgtgcagaaggaggagacagtcaccaacatccagtttgtgctgctggactgttcgcacctcaagttctccctggtgcagcactgcaatgaatggcagaacaagttcgcgactctgctcagggagatggctgctgggcgcctcctggagctgcacacctacctgaaggagaacgcagagaa

SEQ ID NO: 1208 - DNA, 158 bp, synthetic construct
  misc_feature 1..158: note = Description of artificial sequence: synthetic polynucleotide sequence
  source 1..158: mol_type = other DNA
gaatcagccgccctccgcagacactggaggaactgggggtcagcttgcagctcgtggatgccctgaagcacgacttggccaacgtggagactcagatccctcccatacacgagcaatttgccattcttgaaaagtacgaggtgccagtcgaggacagt

SEQ ID NO: 1209 - DNA, 176 bp, synthetic construct
  misc_feature 1..176: note = Description of artificial sequence: synthetic polynucleotide sequence
  source 1..176: mol_type = other DNA
ggtcctggagatgctggacagtctcaacggggagtgggttgtcttccaacaaactctgctggacagtaagcaaatgctgaagaaacacaaggagaaattcaagacaggcctgatccactcggcagatgacttcaagaagaaagcacatacacttctggaagatttcgaattcaaag

SEQ ID NO: 1210 - DNA, 165 bp, synthetic construct
  misc_feature 1..165: note = Description of artificial sequence: synthetic polynucleotide sequence
  source 1..165: mol_type = other DNA
ggccatttcaccagcaacgtgggatacatgtctgccttagaccagattacacaagtgcgggccatgctgatggccatgcgggaagaggaaaatagtctccgagccaacctgggcatcttcaagatcgagcagccaccctccaaggaccttcagaacctggagaag

SEQ ID NO: 1211 - DNA, 163 bp, synthetic construct
  misc_feature 1..163: note = Description of artificial sequence: synthetic polynucleotide sequence
  source 1..163: mol_type = other DNA
ggagctcgatgccctccagcaaatctgggagatcgcacgagactgggaggagaactggaatgagtggaagactggccggttcctgatcctgcagacggaaaccatggagaccacggcccacgggctgtttcgtcgcctcacaaaattagccaaagagtataag

SEQ ID NO: 1212 - DNA, 121 bp, synthetic construct
  misc_feature 1..121: note = Description of artificial sequence: synthetic polynucleotide sequence
  source 1..121: mol_type = other DNA
tttgctcaggaccgaaactgggaaattattgaaaccactcgctcaaaaatagagcagttcaagaggaccatgcctctcatctcagacctgcggaaccctgcccttagagagaggtgaggct

SEQ ID NO: 1213 - DNA, 158 bp, synthetic construct
  misc_feature 1..158: note = Description of artificial sequence: synthetic polynucleotide sequence
  source 1..158: mol_type = other DNA
ggcactgggaccaggtccgggatgagatccagcgggagtttgatcaggaatctgaaagcttcaccttggagcagattgtggagcttgggatggatcagcatgtggagaaaattggggagatctctgcttcagcaactaaagagctggctatagaagtg

SEQ ID NO: 1214 - DNA, 121 bp, synthetic construct
  misc_feature 1..121: note = Description of artificial sequence: synthetic polynucleotide sequence
  source 1..121: mol_type = other DNA
ccccaatttctctccacaggctttacaaaacattgccaagacctgggatgtgactcagctcgacatagtaccctacaaggataagggccatcatcggctcaggtcaggggagctggggctc

SEQ ID NO: 1215 - DNA, 182 bp, synthetic construct
  misc_feature 1..182: note = Description of artificial sequence: synthetic polynucleotide sequence
  source 1..182: mol_type = other DNA
gaggtacagaagaagtattccaggcactggaagataaccaggtagctctgtctaccatgaaggcatcacgctttgtcaaggcctttgagaaggatgtggaccactgggaacgctgcctctccctcattttggaggttattgagatgattctcacagtgcagcgtcagtggatgtacttagag

SEQ ID NO: 1216 - DNA, 140 bp, synthetic construct
  misc_feature 1..140: note = Description of artificial sequence: synthetic polynucleotide sequence
  source 1..140: mol_type = other DNA
gaatatcttcctaggagaagacatccgcaagcagctgcccaatgaatcgaccttatttgaccaggtcaacagcaactggaaagccatcatggacaggatgaacaaggacaacaatgctctccggagcacccatcacccag

SEQ ID NO: 1217 - DNA, 219 bp, synthetic construct
  misc_feature 1..219: note = Description of artificial sequence: synthetic polynucleotide sequence
  source 1..219: mol_type = other DNA
ggcctcctggacacattgatagaaatgaatacaatcctggaagatattcagaaatctctggatatgtatttagagaccaagcgacatattttcccccgcttctacttcttgtccaatgatgacctgctggagattctgggccagtcccgaaacccagaggctgtgcagccacacctcaaaaaatgctttgacaacatcaagttgctgagaatccagaag

SEQ ID NO: 1218 - DNA, 121 bp, synthetic construct
  misc_feature 1..121: note = Description of artificial sequence: synthetic polynucleotide sequence
  source 1..121: mol_type = other DNA
ctttctgcaggttggagggcccagcagcaaatgggaagctgtggggatgttctcgggcgacggcgagtacattgacttcctccactcagtatttttagaaggccctgtggaggtgagttgt

SEQ ID NO: 1219 - DNA, 121 bp, synthetic construct
  misc_feature 1..121: note = Description of artificial sequence: synthetic polynucleotide sequence
  source 1..121: mol_type = other DNA
ctggcttggcgatgtggaacagaccatgagggtgaccctgcgggaccttctccggaactgccacctggccctcaggaagttcctcaacaagagggacaaatgggtgaaggagtgggctggc

SEQ ID NO: 1220 - DNA, 121 bp, synthetic construct
  misc_feature 1..121: note = Description of artificial sequence: synthetic polynucleotide sequence
  source 1..121: mol_type = other DNA
cccaggtggtgatcactgccagtcagatccagtggacggctgatgtcaccaagtgcctgctgacagcgaaggagcgggcagacaagaaaatcctcaaggtcatgaagaagaaccaggtgag

SEQ ID NO: 1221 - DNA, 190 bp, synthetic construct
  misc_feature 1..190: note = Description of artificial sequence: synthetic polynucleotide sequence
  source 1..190: mol_type = other DNA
ggtgtcaatcctgaataagtattcagaagccatcagggggaacttgaccaagatcatgcggcttaaaattgtggctctggtgacgatagaaattcatgcccgggatgtgttggagaagctttacaagagtggcctcatggatgtcaattcctttgactggctcagccaacttcggttctactgggagaag

SEQ ID NO: 1222 - DNA, 121 bp, synthetic construct
  misc_feature 1..121: note = Description of artificial sequence: synthetic polynucleotide sequence
  source 1..121: mol_type = other DNA
tttccccaggatcttgatgactgtgtcatccgccagaccaacacgcaatttcagtataattatgagtacttgggtaactcgggccggctcgtcatcacccccctgacggacaggtctgcca

SEQ ID NO: 1223 - DNA, 191 bp, synthetic construct
  misc_feature 1..191: note = Description of artificial sequence: synthetic polynucleotide sequence
  source 1..191: mol_type = other DNA
ggtgttacatgacactgaccacggcattgcacctgcaccgagggggctcccccaaaggccctgcaggcacaggcaagaccgagaccgtcaaggacctgggcaaggccctgggcatatatgtcattgtggtcaactgctctgagggcctggactacaagtccatgggccgaatgtactcaggtctggcccag

SEQ ID NO: 1224 - DNA, 182 bp, synthetic construct
  misc_feature 1..182: note = Description of artificial sequence: synthetic polynucleotide sequence
  source 1..182: mol_type = other DNA
gactggagcttggggctgctttgatgagtttaaccgcatcaacatcgaggtgctgtcagtggtggcccaccagatcctgtgcatcctgtctgccctggctgccggcctcacccatttccattttgatggctttgaaataaatctggtgtggtcctgtgggatcttcattaccatgaatcctg

SEQ ID NO: 1225 - DNA, 121 bp, synthetic construct
  misc_feature 1..121: note = Description of artificial sequence: synthetic polynucleotide sequence
  source 1..121: mol_type = other DNA
atgctggccgcacagagcttcccgaaaatcttaaatccatgttccgcccaattgccatggtggtgcctgactccaccctcattgcagaaatcattctctttggagagggctttggcaactg

SEQ ID NO: 1226 - DNA, 154 bp, synthetic construct
  misc_feature 1..154: note = Description of artificial sequence: synthetic polynucleotide sequence
  source 1..154: mol_type = other DNA
gattctggccaagaaggtgtacacactctactcactggctgtgcagcagctgtccagacaggaccactatgactttggcctgcgtgccctcacctcccttctgcgctatgctggcaagaagcgccgcctacagccggatctgactgatgaagag

SEQ ID NO: 1227 - DNA, 121 bp, synthetic construct
  misc_feature 1..121: note = Description of artificial sequence: synthetic polynucleotide sequence
  source 1..121: mol_type = other DNA
tctgctgctctcaatgagagatatgaacatcgccaagctcacttcagttgatgcacccctgttcaatgccatcgtgcaagatctgtttcccaacattgagctgcctgtcattgactatggc

SEQ ID NO: 1228 - DNA, 220 bp, synthetic construct
  misc_feature 1..220: note = Description of artificial sequence: synthetic polynucleotide sequence
  source 1..220: mol_type = other DNA
gctgcgggagaccgttgagcaggagattcgagacatgggcctgcaaagcacgccgttcaccctcaccaaggttttccagttgtatgaaaccaagaactcccgccactccaccatgatcgtgggctgcacgggcagcggcaagactgcctcatggcgcattctacaggcctccctgtcctctctgtgccgcgccggagaccctaacttcaacattgttaga

SEQ ID NO: 1229 - DNA, 121 bp, synthetic construct
  misc_feature 1..121: note = Description of artificial sequence: synthetic polynucleotide sequence
  source 1..121: mol_type = other DNA
aggagttccctttgaaccccaaggcattgtccctaggggaactgtatggggaatatgacctcagcaccaatgaatggacagatggcatcttgtccagtgtcatgcggacggcatgtgcagg

SEQ ID NO: 1230 - DNA, 138 bp, synthetic construct
  misc_feature 1..138: note = Description of artificial sequence: synthetic polynucleotide sequence
  source 1..138: mol_type = other DNA
gatgagaaacccgacgagaagtggatcctgttcgatggccccgtggacacactgtggatcgagaacatgaactccgtcatggacgataacaaggtgttgaccctcatcaacggcgagcgcatcgcgatgcccgagcag

SEQ ID NO: 1231 - DNA, 139 bp, synthetic construct
  misc_feature 1..139: note = Description of artificial sequence: synthetic polynucleotide sequence
  source 1..139: mol_type = other DNA
ggtgtctctcctgtttgaagtggaggacctggcaatggcctctccggccactgtatcccgctgcgggatggtctacactgactacgctgacctgggctggaagccctatgttcagtcatggctggagaagaggccaaag

SEQ ID NO: 1232 - DNA, 160 bp, synthetic construct
  misc_feature 1..160: note = Description of artificial sequence: synthetic polynucleotide sequence
  source 1..160: mol_type = other DNA
ggctgaggtggagccccttcaacgcatgttcgaaaagctcatcaacaagatgctggcctttaagaaggacaactgcaaggagctggtgcccctgcccgagtacagcggtatcacctccctctgcaagctgtactctgccctggccacgccagagaatggg

SEQ ID NO: 1233 - DNA, 154 bp, synthetic construct
  misc_feature 1..154: note = Description of artificial sequence: synthetic polynucleotide sequence
  source 1..154: mol_type = other DNA
ggtgaacccagctgacggcgagaactatgtcaccatggtagagatgacatttgtgttcagcatgatctggtctgtgtgtgcctctgtggatgaggagggccggaagaggatcgacagctacctccgagagatcgagggctcctttcccaataag

SEQ ID NO: 1234 - DNA, 121 bp, synthetic construct
  misc_feature 1..121: note = Description of artificial sequence: synthetic polynucleotide sequence
  source 1..121: mol_type = other DNA
acatgccctccttaggacacggtatatgagtattttgtggaccccaaaatacggagttggacatcatttgaggacaagctccctaagagttggcgctaccctccaaagtaagagctgggcc

SEQ ID NO: 1235 - DNA, 200 bp, synthetic construct
  misc_feature 1..200: note = Description of artificial sequence: synthetic polynucleotide sequence
  source 1..200: mol_type = other DNA
gcgcccccttctataagatcatggtgcccaccgtcgacactgttcgctacaactacctggtgagcagcttggtggccaaccagaatcccattctgctggtgggtcccgtggggactgggaagacctccatcgcccagagcgttctgcagtccctgccctccagccagtggtcggtgctcgttgtcaacatgtccgcacag

SEQ ID NO: 1236 - DNA, 226 bp, synthetic construct
  misc_feature 1..226: note = Description of artificial sequence: synthetic polynucleotide sequence
  source 1..226: mol_type = other DNA
gaccacatccaataacgtgcagagcatcattgagagcagggttgagaagcgaaccaagggtgtctacgtgccattcgggggcaaaagcatgatcacctttatggatgacctaaatatgcccgctaaggacatgtttgggtcccagccacccctggagctgatccgcctctggattgactatggcttctggtatgaccgtacgaagcagaccatcaagtacattcga

SEQ ID NO: 1237 - DNA, 121 bp, synthetic construct
  misc_feature 1..121: note = Description of artificial sequence: synthetic polynucleotide sequence
  source 1..121: mol_type = other DNA
ctctctaggaaatgttcctgatggctgccatgggcccccctgggggtggacggactgtcatctccccaaggctacggagtcgcttcaacattatcaacatgaccttccccacagtgaggac

SEQ ID NO: 1238 - DNA, 190 bp, synthetic construct
  misc_feature 1..190: note = Description of artificial sequence: synthetic polynucleotide sequence
  source 1..190: mol_type = other DNA
gaagtcccagatcatccgcatattcggcaccatgatcaatcagaagcttcaggactttgaggaagaggtgaagcccattgggaacgtggtgacagaggccaccctggacatgtacaacaccgtggtacagcgcttcctgcccacgcccaccaagatgcattacctcttcaaccttcgagacatctccaag

SEQ ID NO: 1239 - DNA, 121 bp, synthetic construct
  misc_feature 1..121: note = Description of artificial sequence: synthetic polynucleotide sequence
  source 1..121: mol_type = other DNA
agtcagtcctcttcccaggtgttccagggcatgcttagagccaacaaggacttccatgataccaagtccagcatcacacggctctggatccatgaatgtttcaggtgacatgcatgtgccc

SEQ ID NO: 1240 - DNA, 121 bp, synthetic construct
  misc_feature 1..121: note = Description of artificial sequence: synthetic polynucleotide sequence
  source 1..121: mol_type = other DNA
tctctgaccggctggttgatgcggcagacacagaagccttcatgggcatcataagcgacaagctcggctccttctttgacctcacatttcatcatctctgtcccagcaagcgtcctcctat

SEQ ID NO: 1241 - DNA, 151 bp, synthetic construct
  misc_feature 1..151: note = Description of artificial sequence: synthetic polynucleotide sequence
  source 1..151: mol_type = other DNA
ggggatttcctgaaggagcccaaggtgtatgaagacctcacggatctgacagtgctgaagacagtcatggagacagctctaaatgagtataacctgtcaccctctgtcgtgcccatgcagctagtgctcttccgagaggctattgaacaca

SEQ ID NO: 1242 - DNA, 169 bp, synthetic construct
  misc_feature 1..169: note = Description of artificial sequence: synthetic polynucleotide sequence
  source 1..169: mol_type = other DNA
gtcacacggatcgtgcgggtcattggacagcctcggggcaacatgctcctggtgggtatcgggggcagcggacgccagagtctggcccgcctggcttcatccatctgcgactacaccaccttccagatcgaggtcaccaaacattatcggaagcaggagttccgagatg

SEQ ID NO: 1243 - DNA, 162 bp, synthetic construct
  misc_feature 1..162: note = Description of artificial sequence: synthetic polynucleotide sequence
  source 1..162: mol_type = other DNA
gatatcaagcgtctgtatcgccaggctggggtggagctcaagaccacgtccttcatttttgtggacacccaaatagctgatgagtccttcctagaggacatcaacaacatcctcagctcaggcgaggtgcccaatctctacaagcctgatgaatttgaagag

SEQ ID NO: 1244 - DNA, 141 bp, synthetic construct
  misc_feature 1..141: note = Description of artificial sequence: synthetic polynucleotide sequence
  source 1..141: mol_type = other DNA
gatccagtcgcatatcatagaccaggcccgggtggagcaggtgcctgagtcatcggacagcctcttcgcctacctcattgaacgcgtgcagaacaacctgcacatcgtgctctgcctcagccccatgggggatcccttcag

SEQ ID NO: 1245 - DNA, 134 bp, synthetic construct
  misc_feature 1..134: note = Description of artificial sequence: synthetic polynucleotide sequence
  source 1..134: mol_type = other DNA
ggaactggatccgccagtacccagccttggtgaactgcacaaccatcaactggttctcagagtggccccaagaggccctgctcgaggtggctgagaagtgcctcataggagtagacctgggaactcaggagaat

SEQ ID NO: 1246 - DNA, 141 bp, synthetic construct
  misc_feature 1..141: note = Description of artificial sequence: synthetic polynucleotide sequence
  source 1..141: mol_type = other DNA
gatccacaggaaggtggcccagatctttgtcactatgcactggtcagtagctcagtattcccagaagatgctgttggaactgcggagacacaactatgtcacacccaccaaatacctggaactcctgtctggatataagaa

SEQ ID NO: 1247 - DNA, 212 bp, synthetic construct
  misc_feature 1..212: note = Description of artificial sequence: synthetic polynucleotide sequence
  source 1..212: mol_type = other DNA
ggttgctgggagaaaaacggcaggagctgctggcccaagccaataaactgcggacaggcttgttcaagatcgacgaaactagggaaaaggtgcaagtgatgtcgttggagctggaggatgccaagaagaaggtggctgagttccagaagcagtgtgaggagtacctggtcatcattgtgcagcagaagcgggaggcagatgagcagcagaag

SEQ ID NO: 1248 - DNA, 121 bp, synthetic construct
  misc_feature 1..121: note = Description of artificial sequence: synthetic polynucleotide sequence
  source 1..121: mol_type = other DNA
aggccgtaacagccaacagtgaaaagattgcagttgaggaaatcaagtgtcaggcactggctgacaatgcccagaaagatctagaagaggcactgcccgccctggaagaggccatgcgggt

SEQ ID NO: 1249 - DNA, 143 bp, synthetic construct
  misc_feature 1..143: note = Description of artificial sequence: synthetic polynucleotide sequence
  source 1..143: mol_type = other DNA
ggccctggagtctctgaacaagaaggatataggagagatcaagtcttatggacggcccccagcccaagtggagatagtgatgcaggcagttatgattcttcgaggcaacgagcccacatgggcagaggccaagaggcagctag

SEQ ID NO: 1250 - DNA, 171 bp, synthetic construct
  misc_feature 1..171: note = Description of artificial sequence: synthetic polynucleotide sequence
  source 1..171: mol_type = other DNA
ggggaacagaacttcatcaagtcactgatcaactttgataaagacaatatctcagataaggttctgaagaagattggggcctactgcgcccagcctgacttccagcctgatatcatcggccgcgtctccctggctgccaagtccctctgcatgtgggtgcgggccatggag

SEQ ID NO: 1251 - DNA, 121 bp, synthetic construct
  misc_feature 1..121: note = Description of artificial sequence: synthetic polynucleotide sequence
  source 1..121: mol_type = other DNA
agctgtatgggcggctatatcgggtggtggagcccaagcgaatccgaatgaacgctgccttggctcagcttcgggagaagcaagccgcgctcgctgaggcccaggagaagctgcgggaggt

SEQ ID NO: 1252 - DNA, 166 bp, synthetic construct
  misc_feature 1..166: note = Description of artificial sequence: synthetic polynucleotide sequence
  source 1..166: mol_type = other DNA
ggtagctgagaaactggagatgctaaagaaacagtatgatgagaagctggcacagaaggaggagcttcgcaagaagtctgaagagatggagctgaagctggagcgagctgggatgctcgtgtcggggttggctggcgagaaggccagatgggaggagacagtccag

SEQ ID NO: 1253 - DNA, 121 bp, synthetic construct
  misc_feature 1..121: note = Description of artificial sequence: synthetic polynucleotide sequence
  source 1..121: mol_type = other DNA
cctggaggaggacctgggctacctggtgggggactgtctcctggcagctgccttcctgtcctacatgggacccttcctgaccaactaccgggatgagattgtcaaccaaatctggatcggg

SEQ ID NO: 1254 - DNA, 150 bp, synthetic construct
  misc_feature 1..150: note = Description of artificial sequence: synthetic polynucleotide sequence
  source 1..150: mol_type = other DNA
gatctgggagcttcaggttccttgctccccttctttcgccatcgataacttcctgtgcaatcctaccaaagtccgggactggaacatccaagggttgccctcagacgccttctccactgagaatggcatcatcgtcacccgaggcaacag

SEQ ID NO: 1255 - DNA, 121 bp, synthetic construct
  misc_feature 1..121: note = Description of artificial sequence: synthetic polynucleotide sequence
  source 1..121: mol_type = other DNA
cacctctgacctgtactccccttccaggtgggcactgatgatcgaccctcaggcccaggccctgaaatggattaagaacatggaaggaggccaggtgtgaggctggggggtcaggttagcc

SEQ ID NO: 1256 - DNA, 152 bp, synthetic construct
  misc_feature 1..152: note = Description of artificial sequence: synthetic polynucleotide sequence
  source 1..152: mol_type = other DNA
gggcctgaagatcatcgacctgcagatgagcgattacctgcgaatcctagaacacgccattcactttggatacccggtgctacttcagaacgtgcaggaatatctggaccccacactgaaccccatgctcaacaaatctgtagcccgaatcg

SEQ ID NO: 1257 - DNA, 150 bp, synthetic construct
  misc_feature 1..150: note = Description of artificial sequence: synthetic polynucleotide sequence
  source 1..150: mol_type = other DNA
ggtggtcggctgttgatgcgcattggcgataaggaggtggaatataataccaatttccgtttctacatcaccaccaagctctccaacccccactacagcccagagacctcagccaagaccaccatcgtcaactttgctgttaaagaacag

SEQ ID NO: 1258 - DNA, 135 bp, synthetic construct
  misc_feature 1..135: note = Description of artificial sequence: synthetic polynucleotide sequence
  source 1..135: mol_type = other DNA
gggcctggaggcccagctgctgggcattgtggtgcggaaggagcggcctgagctggaggagcagaaggactcactggtcatcaacatcgcggctggtaaaaggaagctcaaggagctggaggatgagatcctgcg

SEQ ID NO: 1259 - DNA, 146 bp, synthetic construct
  misc_feature 1..146: note = Description of artificial sequence: synthetic polynucleotide sequence
  source 1..146: mol_type = other DNA
ggctgctgaatgaggccaccggctccctgctggatgatgtgcagctggtgaacacgctgcatacctccaagatcacagccacagaggtgactgagcagctggagaccagtgagaccacagagatcaacactgacttggcgcgggag

SEQ ID NO: 1260 - DNA, 201 bp, synthetic construct
  misc_feature 1..201: note = Description of artificial sequence: synthetic polynucleotide sequence
  source 1..201: mol_type = other DNA
ggcttaccgcccatgcgcccagcgggcatcaatcctgttcttcgtgctcaatgatatgggctgcatcgaccccatgtaccagttctcactggatgcctacatcagcctctttattctcagcattgacaaaagccaccgcagcaataagctggaggaccgcattgactacctgaatgactaccacacctacgctgtctacag

SEQ ID NO: 1261 - DNA, 121 bp, synthetic construct
  misc_feature 1..121: note = Description of artificial sequence: synthetic polynucleotide sequence
  source 1..121: mol_type = other DNA
cacctgccgtacccttttcgaacgccacaaactactattcagttttcatatgtgtgccaaaatcttggagacttctggcaagctcaacatggatgaatacaacttctttctacgtgggggt

SEQ ID NO: 1262 - DNA, 188 bp, synthetic construct
  misc_feature 1..188: note = Description of artificial sequence: synthetic polynucleotide sequence
  source 1..188: mol_type = other DNA
ggtcttggatcgggagggccaaatggacaatccatgtagtagctggcttgcagatgcctactgggataacatcacagagctagacaaactgaccaacttccacggactcatgaactcctttgagcagtaccctcgtgactggcacctgtggtataccaatgctgccccggagaaggcgatgctgccag

SEQ ID NO: 1263 - DNA, 150 bp, synthetic construct
  misc_feature 1..150: note = Description of artificial sequence: synthetic polynucleotide sequence
  source 1..150: mol_type = other DNA
ggtgagtgggaaaatgcctgcaatgaaatgcaacggatgctgatcgttcgctccctgcgccaggaccgcgtggccttctgcgtgacctccttcatcatcaccaaccttggctcccgcttcatcgagccgcctgtgctgaatatgaagtcg

SEQ ID NO: 1264 - DNA, 185 bp, synthetic construct
  misc_feature 1..185: note = Description of artificial sequence: synthetic polynucleotide sequence
  source 1..185: mol_type = other DNA
ggtgctggaggattcaaccccacgatccccactcgtgttcatcctgtcccctggtgtggaccccaccagtgccctgctgcagctggcagagcacatgggcatggcccagcgcttccacgccctgtccctgggccagggccaggcccccatcgctgctcggctcctccgagagggtgtgactcagg

SEQ ID NO: 1265 - DNA, 192 bp, synthetic construct
  misc_feature 1..192: note = Description of artificial sequence: synthetic polynucleotide sequence
  source 1..192: mol_type = other DNA
ggacactgggtgttcctggcaaactgccacctgtcactgtcttggatgcctaatctggacaagctggtggagcagctgcaggtggaggatcctcatccatccttccgcctctggctcagctccatcccccacccagacttccctatctcaatcttgcaggtcagcatcaagatgaccacagagccaccaaag

SEQ ID NO: 1266 - DNA, 193 bp, synthetic construct
  misc_feature 1..193: note = Description of artificial sequence: synthetic polynucleotide sequence
  source 1..193: mol_type = other DNA
gggcctaaaggccaacatgacacgtctttaccaactgatgtcagaaccacagttttcccgctgctccaaacctgccaaatataagaagctgctgttttcactctgtttcttccactctgtgttacttgaacgcaaaaagttcctgcagcttggctggaacatcatctatggcttcaatgactccgactttgag

SEQ ID NO: 1267 - DNA, 186 bp, synthetic construct
  misc_feature 1..186: note = Description of artificial sequence: synthetic polynucleotide sequence
  source 1..186: mol_type = other DNA
ggtgtcagaaaacttgctgagcctctatctcgatgagtacgaggagacaccttgggacgcacttaagtacctcattgccggcatcaactatggtggacatgtcacagatgactgggaccggcgcctgctgaccacctacatcaatgattatttctgtgaccagtctctatcaactcccttccaccg

SEQ ID NO: 1268 - DNA, 230 bp, synthetic construct
  misc_feature 1..230: note = Description of artificial sequence: synthetic polynucleotide sequence
  source 1..230: mol_type = other DNA
ggttgtcagcactggagacttatttcatccccaaggatggcagcctcgcttcttacaaggaatacatcagcttattgcctggcatggacccccctgaggcctttggccagcaccccaatgctgatgtggcctctcagatcactgaggcacaaaccctctttgatactttgctttccttgcaacctcagattacacccaccagggctggaggccagacccgggaagagaag

SEQ ID NO: 1269 - DNA, 153 bp, synthetic construct
  misc_feature 1..153: note = Description of artificial sequence: synthetic polynucleotide sequence
  source 1..153: mol_type = other DNA
ggtccttgagttggccgctgatgtgaagcagaagatccctgaaatgatcgactatgaggggactcaaaaactgctagctctcgacccctcccccctcaatgtggtccttctgcaggagatccagagatacaacacactgatgcagaccatcct

SEQ ID NO: 1270 - DNA, 121 bp, synthetic construct
  misc_feature 1..121: note = Description of artificial sequence: synthetic polynucleotide sequence
  source 1..121: mol_type = other DNA
caggttctcactgacagacctagagaaaggcatccagggtctcatcgtcatgtctacaagcctggaagagattttcaattgcatctttgatgcccatgttcctccgctctggggaaaggca

SEQ ID NO: 1271 - DNA, 178 bp, synthetic construct
  misc_feature 1..178: note = Description of artificial sequence: synthetic polynucleotide sequence
  source 1..178: mol_type = other DNA
ggcatacccctcacaaaagccattggctgcctggacccgggacttggccatgcgtgtggagcagtttgagctgtgggccagccgggcccggcctcctgtgatcttctggttgtctggtttcacctttcccactggcttcctcactgctgtgctgcagtcttcagctcgccaaaacaac

SEQ ID NO: 1272 - DNA, 121 bp, synthetic construct
  misc_feature 1..121: note = Description of artificial sequence: synthetic polynucleotide sequence
  source 1..121: mol_type = other DNA
ttattctcaccttcaacccccaggtttcagtggacagcctctcctgggagtttatcgtttccactgtggatgacagcaacctagtgtatccccccaaggtgggagccagttgtgcttgggg

SEQ ID NO: 1273 - DNA, 152 bp, synthetic construct
  misc_feature 1..152: note = Description of artificial sequence: synthetic polynucleotide sequence
  source 1..152: mol_type = other DNA
ggatggtgtctgggtccggggcctgtacctggaaggtgctggctgggaccggaagaactcctgcttggtggaggcagagcccatgcagcttgtctgcctcatgcccacgatccacttccggcctgcagagagccgcaagaagagcgccaagg

SEQ ID NO: 1274 - DNA, 156 bp, synthetic construct
  misc_feature 1..156: note = Description of artificial sequence: synthetic polynucleotide sequence
  source 1..156: mol_type = other DNA
ggcatgtactcctgcccctgctattactatcccaaccgggcaggcagctcagaccgagcctcctttgtcatcggcattgacctgcggtctggggccatgacacctgatcattggatcaagaggggcactgctctactcatgagcctggacagctga

SEQ ID NO: 1275 - DNA, 121 bp, synthetic construct
  misc_feature 1..121: note = Description of artificial sequence: synthetic polynucleotide sequence
  source 1..121: mol_type = other DNA
gtccatcccaaagtgccccgtgctgaagggtcgagtgcagaagatcctacattggcggtggggggagccacctgtagcagtgccagcccctcaacaggcagatggaaatccagatgtccca

SEQ ID NO: 1276 - DNA, 121 bp, synthetic construct
  misc_feature 1..121: note = Description of artificial sequence: synthetic polynucleotide sequence
  source 1..121: mol_type = other DNA
cgtcctcttcaaggcagatcagagcgagagttctttgtcaagtgggtaggactatcctactggcactgctcctgggccaaggagcttcaggtactaggaccttttctttccctctccccca

SEQ ID NO: 1277 - DNA, 350 bp, synthetic construct
  misc_feature 1..350: note = Description of artificial sequence: synthetic polynucleotide sequence
  source 1..350: mol_type = other DNA
ttcacttcagcagggctctgtgttctcctctggctatgtgagacgagaactcataccgatcatggcttcgatatccacacatgttacactcgaaagggtcacggaagccgtggcagcccatgtgaatcgtgaacatcacatagtccaggaagaggacgcggcagtggtcacaccgatacacatccatcacctccccttccttgttgatcactttgacggagtctcttgggcagatgggcgggggcttgaggagttcgtaagagcggggaacctccttcagaagtggcatcccattgcgggcccgagacaggaccatgtgattttgctgatagatgtgattctggcgttct

SEQ ID NO: 1278 - DNA, 355 bp, synthetic construct
  misc_feature 1..355: note = Description of artificial sequence: synthetic polynucleotide sequence
  source 1..355: mol_type = other DNA
tcatggttgctgtcagtgtccgtggagtcgtggccactattgttgggagagaggcctctctcagaaggcacgctcttctctggaaggtggatgcttttcttttccagctcttgaggggcaccgtttgacatctcagcccgggtgagggctatgggatacatgctgctgataactggaaccatctccgaggtgggagcaggcggtgtctggaccaaggggcgcagggcttcggcgccaagatagctgatggcgttattgatggcttggtccatcatgcgggtctgtatgagctcactctctttctcatacatgtaacttgaattatagttgacatcaaagcagtggcgcttctcac

SEQ ID NO: 1279 - DNA, 121 bp, synthetic construct
  misc_feature 1..121: note = Description of artificial sequence: synthetic polynucleotide sequence
  source 1..121: mol_type = other DNA
accaatgaatttctgaggcattgagctttttcgttttgccacattgcttgctaatctgtccagtacgagagctctttcacttcccatctctgctttgatgtgtcttgcctccgcacttgct

SEQ ID NO: 1280 - DNA, 121 bp, synthetic construct
  misc_feature 1..121: note = Description of artificial sequence: synthetic polynucleotide sequence
  source 1..121: mol_type = other DNA
accagtgtcccctgggtcagtgctctgaagaaatgtacggcagcgctccttgtgctcctcaagggaacttctctgcttgtaactccttccacaaaactcacatttgtagggtttctccact

SEQ ID NO: 1281 - DNA, 169 bp, synthetic construct
  misc_feature 1..169: note = Description of artificial sequence: synthetic polynucleotide sequence
  source 1..169: mol_type = other DNA
ccagaatgtgtcctaagatgccccgtgagcgcatctcttctttggcatgcatagttgcagaggtgacacttaaaaggtttttcccctgtgtgcagtttaatgtggcggaggaggttacctttctgagtaaaagatgccccacactgattacactggaatgggcgttcac

SEQ ID NO: 1282 - DNA, 262 bp, synthetic construct
  misc_feature 1..262: note = Description of artificial sequence: synthetic polynucleotide sequence
  source 1..262: mol_type = other DNA
ccagtatggcttcgcttatgaaccattaagacattgaagctgatgcaggataatccacacacatcgcagttcatctttccactggttggcctgctactatcgaatgagacaacatgtctctccaacttaatgttttcatattcattatattctcttgaatagctgtaagggatttcaggctcttctgcatttcccatgggttctgactttaaaacattctcatctctttcactgtattcatctttcactttcattgaatcat

SEQ ID NO: 1283 - DNA, 121 bp, synthetic construct
  misc_feature 1..121: note = Description of artificial sequence: synthetic polynucleotide sequence
  source 1..121: mol_type = other DNA
tacggctcacctcctatgtcttcatcttcattggctgggccttctccactgtccacattttccatttcatgagatttggttaaactgtagtcattcaaaaccgctgcactttctaaaagat

SEQ ID NO: 1284 - DNA, 121 bp, synthetic construct
  misc_feature 1..121: note = Description of artificial sequence: synthetic polynucleotide sequence
  source 1..121: mol_type = other DNA
ggtatatttccagagaggaaagacctgatgttacctgcgggcacagactgctcctgagtgcttttcagttccgcatttgtttgtatatctgaaaagaaagaggttataaatattagctact

SEQ ID NO: 1285 - DNA, 121 bp, synthetic construct
  misc_feature 1..121: note = Description of artificial sequence: synthetic polynucleotide sequence
  source 1..121: mol_type = other DNA
ttgcacaggttaagtttctcaaagaccccggagaaaagaagcgggctggaggctcaccttccatgtcgctgccgggccgggctggagctgccgctgtggctactcggcctctccacgtgct

SEQ ID NO: 1286 - DNA, 121 bp, synthetic construct
  misc_feature 1..121: note = Description of artificial sequence: synthetic polynucleotide sequence
  source 1..121: mol_type = other DNA
actactttgcaatgcactctcatttctcttaaatacacaaccagttctccctttgataagttcatggggggaaagaatagagtaggccaaggttatcgctttcgctcccctctctgtgtcc

SEQ ID NO: 1287 - DNA, 121 bp, synthetic construct
  misc_feature 1..121: note = Description of artificial sequence: synthetic polynucleotide sequence
  source 1..121: mol_type = other DNA
tccttttccttgcgctcctgcttggctagtttgtctctctccctctgcagcttgtcctgttccttcttcctttgggattcatcccgaagtgagtctcgctccagttttcgggcattaagga

SEQ ID NO: 1288 - DNA, 121 bp, synthetic construct
  misc_feature 1..121: note = Description of artificial sequence: synthetic polynucleotide sequence
  source 1..121: mol_type = other DNA
caccctccttgcctctcccactccagcaagtctccagacccaccttcttcgcccggaagttcgagtcgactgtgaaccaggaggtgctggaaatcctggacttccacctgtatggcagcta

SEQ ID NO: 1289 - DNA, 121 bp, synthetic construct
  misc_feature 1..121: note = Description of artificial sequence: synthetic polynucleotide sequence
  source 1..121: mol_type = other DNA
cggcacgccagccctcaaggcctactgggagaacacctacgacgcggctgatggccccagtgggctcagtgatgtcatgctcactgcttacacagccttcgcccgcctcagcctgcaccat

SEQ ID NO: 1290 - DNA, 121 bp, synthetic construct
  misc_feature 1..121: note = Description of artificial sequence: synthetic polynucleotide sequence
  source 1..121: mol_type = other DNA
caaggggtgtgcctctggggaccaaggatatgccacactgggggtgtaatggggaaaaatctggcaagctgggtgcacagttgcatcctggggccgagagccaggggtgggctcggaggga

SEQ ID NO: 1291 - DNA, 121 bp, synthetic construct
  misc_feature 1..121: note = Description of artificial sequence: synthetic polynucleotide sequence
  source 1..121: mol_type = other DNA
cgccttttcctctgtgggtgtcgggcagagaggctggatttttgcaagttgaacagactgctggtactggggcagatgctggaggcgtcaactgggccaggggctggctcagggagggccc

SEQ ID NO: 1292 - DNA, 226 bp, synthetic construct
  misc_feature 1..226: note = Description of artificial sequence: synthetic polynucleotide sequence
  source 1..226: mol_type = other DNA
atcactgtagcataagctgcttgaggttgtcatgcagaatagtatccttcacgtcacggaaaacaaggcggatgttctccgtgttgatagcagtggtgaagtggtggtataagggcttctgttgctggtcccggcgtttgttccggaaacattccaccaggaatttttggacgtctcttaagcagtggggatccccttcaaattctaggaaatagtctttgatgct

SEQ ID NO: 1293 - DNA, 348 bp, synthetic construct
  misc_feature 1..348: note = Description of artificial sequence: synthetic polynucleotide sequence
  source 1..348: mol_type = other DNA
cacaatttgcaccttctcctcaagcaagtctgtcttgtttaagaacagaattatggagacattgctgaaaacccggttattgacgattgtttcaaaaatgttcagagactctgtaaggcgattggtcagtcgatcttccataagcacctggtcaaattcacttgaggaaacaaggaaaagtattgatgtcacactgtcgaaacattcaaaccaacgtttcctttctgatctctgaccacctacatcaaccattttgaaaggaacattttttatttcaaagtcgtattcatggatgcctttggtgggtcttctggcaagcagaatatcttgttgtgatggaatataatc

SEQ ID NO: 1294 - DNA, 121 bp, synthetic construct
  misc_feature 1..121: note = Description of artificial sequence: synthetic polynucleotide sequence
  source 1..121: mol_type = other DNA
ggcactaaacataaacatttggtttaaacacttactggttctccaagtttatccaagttatccaggaaatattttacagattcaccctaaaaacaagaagaaaacaaatagttattagggc

SEQ ID NO: 1295 - DNA, 228 bp, synthetic construct
  misc_feature 1..228: note = Description of artificial sequence: synthetic polynucleotide sequence
  source 1..228: mol_type = other DNA
ccagttgaaattctcgacgccggtcataggcattctgtatgccgctgtctgcccataatgctcttatagcaggaagatattgtaagaaaacccttgtttccaccattccttgggctgccatgggggcccgggtatcaaacgacatcatcttatctccatgttgttggtttgagttgtctccccagggaatatgaagcttctctcgagcatcaaccagcaccctcatac

SEQ ID NO: 1296 - DNA, 284 bp, synthetic construct
  misc_feature 1..284: note = Description of artificial sequence: synthetic polynucleotide sequence
  source 1..284: mol_type = other DNA
cctttgatcacgttgctgtagatggtggggcggaactcctcgcgcgcgcgctggtcgaagtcctgcccgtggatgatccgcatctgcttcaggaaggtggacttgccgctctcgcccgcgcccagcagcaggatcttcaccagccgcttcacataggtcttttcccgagacaggcatttgtcgatctccttggacttgcgttgctgctcggcctcgccactcgtcagcaggcagccggggaagcacacggacagcacggaccgcgacggcaggaagtccgccat

SEQ ID NO: 1297 - DNA, 121 bp, synthetic construct
  misc_feature 1..121: note = Description of artificial sequence: synthetic polynucleotide sequence
  source 1..121: mol_type = other DNA
tacttaccattgtgtaagtcagaatggaggtcatccttaatacagacagaactgagggaccccacagggtcacaattacaggggcggcaaggctcatcctcataaggagacacctgaaagg

SEQ ID NO: 1298 - DNA, 121 bp, synthetic construct
  misc_feature 1..121: note = Description of artificial sequence: synthetic polynucleotide sequence
  source 1..121: mol_type = other DNA
gactcctcctcaagaagaattacctactcgagtgtcatctcctgtatttggagctacctctagtatcaaaagtggtttagatttgaatacaagtttgtccccttctcttttacagcctggg

SEQ ID NO: 1299 - DNA, 121 bp, synthetic construct
  misc_feature 1..121: note = Description of artificial sequence: synthetic polynucleotide sequence
  source 1..121: mol_type = other DNA
acatctgaaaacactcccttttagcaacacttgtatatctagattagaaaaaactagatcaaaatctgaagatagtgcccttttcacacatcacagtcttgggtctgaagtgaacaagatc

SEQ ID NO: 1300 - DNA, 210 bp, synthetic construct
  misc_feature 1..210: note = Description of artificial sequence: synthetic polynucleotide sequence
  source 1..210: mol_type = other DNA
catgtcgctgttgggggacccgctacaggccctgccgccctcggccgcccccacggggccgctgctcgcccctccggccggcgcgaccctcaaccgcctgcgggagccgctgctgcggaggctcagcgagctcctggatcaggcgcccgagggccggggctggaggagactggcggagctggcggggagtcgcgggcgcctccgcctcag

SEQ ID NO: 1301 - DNA, 168 bp, synthetic construct
  misc_feature 1..168: note = Description of artificial sequence: synthetic polynucleotide sequence
  source 1..168: mol_type = other DNA
gttgcctagacctggagcagtgttctcttaaggtactggagcctgaaggaagccccagcctgtgtctgctgaagttaatgggtgaaaaaggttgcacagtcacagaattgagtgatttcctgcaggctatggaacacactgaagttcttcagcttctcagccccccag

SEQ ID NO: 1302 - DNA, 121 bp, synthetic construct
  misc_feature 1..121: note = Description of artificial sequence: synthetic polynucleotide sequence
  source 1..121: mol_type = other DNA
gaataaagattactgtaaacccagagtcaaaggcagtcttggctggacagtttgtgaaactgtgttgccgggcaactggacatccttttgttcaatatcagtggttcaaaatgaataaaga

SEQ ID NO: 1303 - DNA, 152 bp, synthetic construct
  misc_feature 1..152: note = Description of artificial sequence: synthetic polynucleotide sequence
  source 1..152: mol_type = other DNA
gattccaaatggaaatacatcagagcttatttttaatgcagtgcatgtaaaagatgcaggcttttatgtctgtcgagttaataacaatttcacctttgaattcagccagtggtcacagctggatgtttgcgacatcccagagagcttccaga

SEQ ID NO: 1304 - DNA, 180 bp, synthetic construct
  misc_feature 1..180: note = Description of artificial sequence: synthetic polynucleotide sequence
  source 1..180: mol_type = other DNA
ggaagtgttgatggcgtctctgaatccaagttgcaaatctgtgttgaaccaacttcccaaaagctgatgccaggcagcacattggttttacagtgtgttgctgttggaagccctattcctcactaccagtggttcaaaaatgaattaccattaacacatgagaccaaaaagctatacatg

SEQ ID NO: 1305 - DNA, 121 bp, synthetic construct
  misc_feature 1..121: note = Description of artificial sequence: synthetic polynucleotide sequence
  source 1..121: mol_type = other DNA
atattgatataggtgccttatgtggatttggaacaccaaggaacctactggtgtcatgtatataatgatcgagacagtcaagatagcaagaaggtagaaatcatcataggtaagaagtatt

SEQ ID NO: 1306 - DNA, 121 bp, synthetic construct
  misc_feature 1..121: note = Description of artificial sequence: synthetic polynucleotide sequence
  source 1..121: mol_type = other DNA
atcatgaattacaatatattcaaatttgttttttctgaaacaaggaagaacagatgaggcagtggagtgcactgaaggtagtgtaagtctttggtttgaaaccaaatctcctgcatgctag

SEQ ID NO: 1307 - DNA, 121 bp, synthetic construct
  misc_feature 1..121: note = Description of artificial sequence: synthetic polynucleotide sequence
  source 1..121: mol_type = other DNA
aattggtgtttagattacttaatctattttctcttactttgttttagatgaattaaataatcttggtcatcctggtgagtaatacaaacataaaactttagttttagatttttaagttgtt

SEQ ID NO: 1308 - DNA, 121 bp, synthetic construct
  misc_feature 1..121: note = Description of artificial sequence: synthetic polynucleotide sequence
  source 1..121: mol_type = other DNA
tataccatggatcttacatgttttgcttttttatctttgtatagataataaagagcaaacaactgaccagcctttgggtgagtagaactttaaaatgcattatcaaagtataattattgtg

SEQ ID NO: 1309 - DNA, 205 bp, synthetic construct
  misc_feature 1..205: note = Description of artificial sequence: synthetic polynucleotide sequence
  source 1..205: mol_type = other DNA
gcgaaggacaaggttgcccttttgataggaaatatgaattaccgggagcaccccaagctcaaagctcctttggtggatgtgtacgaattgactaacttactgagacagctggacttcaaagtggtttcactgttggatcttactgaatatgagatgcgtaatgctgtggatgagtttttactccttttagacaagggagtatatg

SEQ ID NO: 1310 - DNA, 179 bp, synthetic construct
  misc_feature 1..179: note = Description of artificial sequence: synthetic polynucleotide sequence
  source 1..179: mol_type = other DNA
gggttattatattatgcaggacatggttatgaaaattttgggaacagcttcatggtccccgttgatgctccaaatccatataggtctgaaaattgtctgtgtgtacaaaatatactgaaattgatgcaagaaaaagaaactggacttaatgtgttcttattggatatgtgtaggaaaag

SEQ ID NO: 1311 - DNA, 121 bp, synthetic construct
  misc_feature 1..121: note = Description of artificial sequence: synthetic polynucleotide sequence
  source 1..121: mol_type = other DNA
cctcctccgcctcccttaaatagaaatgactacgatgataccattccaatcttggatgcactaaaagtcaccgccaatattgtgtttggatatgccacgtaagaacatttgatgtttacgt

SEQ ID NO: 1312 - DNA, 121 bp, synthetic construct
  misc_feature 1..121: note = Description of artificial sequence: synthetic polynucleotide sequence
  source 1..121: mol_type = other DNA
tcaaggagcagaagcttttgaaatccagcattctggattggcaaatggaatctttatgaaatttttaaaagacagattattagaagataagaaaatcactgtgttactggatgaagttgca

SEQ ID NO: 1313 - DNA, 151 bp, synthetic construct
  misc_feature 1..151: note = Description of artificial sequence: synthetic polynucleotide sequence
  source 1..151: mol_type = other DNA
gatatgggtaagtgtcaccttaccaaaggcaaacaggctctagagattcgaagtagtttatctgagaagagagcacttactgatccaatacagggaacagaatattctgctgaatctcttgtgcggaatctacagtgggccaaggctcatg

SEQ ID NO: 1314 - DNA, 159 bp, synthetic construct
  misc_feature 1..159: note = Description of artificial sequence: synthetic polynucleotide sequence
  source 1..159: mol_type = other DNA
gaacttccagaaagtatgtgtcttaagtttgactgtggtgttcagattcaattaggatttgcagctgagttttccaatgtcatgatcatctatacaagtatagtttacaaaccaccggagataataatgtgtgatgcctacgttactgattttccactt

SEQ ID NO: 1315 - DNA, 121 bp, synthetic construct
  misc_feature 1..121: note = Description of artificial sequence: synthetic polynucleotide sequence
  source 1..121: mol_type = other DNA
tctagatattgatccaaaagatgcaaataaaggcacacctgaagaaactggcagctacttggtatcaaaggatcttcccaagcattgcctctataccagactcagttcactgcaaaaatta

SEQ ID NO: 1316 - DNA, 439 bp, synthetic construct
  misc_feature 1..439: note = Description of artificial sequence: synthetic polynucleotide sequence
  source 1..439: mol_type = other DNA
ggaacatctagtcttcacagtatgtttatcatatcagtactcaggattggaagatactgtagaggacaagcaggaagtgaatgttgggaaacctctcattgctaaattagacatgcatcgaggtttgggaaggaagacttgctttcaaacttgtcttatgtctaatggtccttaccagagttctgcagccacctcaggaggagcagggcattatcactcattgcaagacccattccatggtgtttaccattcacatcctggtaatccaagtaatgttacaccagcagatagctgtcattgcagccggactccagatgcatttatttcaagtttcgctcaccatgcttcatgtcattttagtagaagtaatgtgccagtagagacaactgatgaaataccatttagtttctctgacaggctcagaatttctgaaaaatga

SEQ ID NO: 1317 - DNA, 121 bp, synthetic construct
  misc_feature 1..121: note = Description of artificial sequence: synthetic polynucleotide sequence
  source 1..121: mol_type = other DNA
aacacagagactcaagcgtccatgatcaacagcctcaagccctgctgcggcacccatgtcagctttgctacaactcaccaggctgcccttggaggtcggggtggcccttctggaattcctc

SEQ ID NO: 1318 - DNA, 121 bp, synthetic construct
  misc_feature 1..121: note = Description of artificial sequence: synthetic polynucleotide sequence
  source 1..121: mol_type = other DNA
tatccaattcttgttgaaagtgctcaaattcctcctgatacttttctttttccttttccgaaatttctttatctggtgtgggcttttttttggagttttggaatagatcattaaaaagata

SEQ ID NO: 1319 - DNA, 136 bp, synthetic construct
  misc_feature 1..136: note = Description of artificial sequence: synthetic polynucleotide sequence
  source 1..136: mol_type = other DNA
ttcacttgtggcccagataggcacccagggtgatgcaagctcccaccagggccaaactgagcagagtcttcagagacagccaggagaaatcaaacagaggccgcatgctggggccgtacagttccacaaaggcatc

SEQ ID NO: 1320 - DNA, 299 bp, synthetic construct
  misc_feature 1..299: note = Description of artificial sequence: synthetic polynucleotide sequence
  source 1..299: mol_type = other DNA
ctcagcccagactcacatcaccaagtgcacctacccagcctccgttatcctggatccaggtgtgcaggtgccggttcaggtactcagtcatccacagggcgatgttgtccaccaggggcgacatctcccggttgacgctctccacacacatgaccccaccgaactcaaagaaggccacaatcctcccccagttcaccccgtccctgaagagctcctccaccaccgtggcaaagcgtccccgcgcggtgaagggcgtcaggtgcagctggctggacatctcggcgaagtcgcggcggtag

SEQ ID NO: 1321 - DNA, 320 bp, synthetic construct
  misc_feature 1..320: note = Description of artificial sequence: synthetic polynucleotide sequence
  source 1..320: mol_type = other DNA
cggcgggagaagtcgtcgccggcctggcggagggtcaggtggaccacaggtggcaccgggctgagcgcaggccccgcggcggcgccgggggcagccggggtctgcagcggcgaggtcctggcgaccgggtcccgggatgcggctggatggggcgtgtgcccgggctgggaggagaagatgcccggtgcgggggcggcccccgggggcgcggcgcccacatctcccgcatcccactcgtagcccctctgcgacagcttataatggatgtacttcatcactatctcccggttatcgtaccctgttctcccagcgtgcgccat

SEQ ID NO: 1322 - DNA, 121 bp, synthetic construct
  misc_feature 1..121: note = Description of artificial sequence: synthetic polynucleotide sequence
  source 1..121: mol_type = other DNA
attaggcagttttgtctgcattttcagatttttctctctgcatcatgcagcgacgaactatgctgtcaaaacttccaaggtaaaacaaagcaatagtgcggaaaaggcccatggtgaccac

SEQ ID NO: 1323 - DNA, 121 bp, synthetic construct
  misc_feature 1..121: note = Description of artificial sequence: synthetic polynucleotide sequence
  source 1..121: mol_type = other DNA
cagagcttacctgctggagcccctcagtaatagaagttactggagccatcccacaggtcagggccgagagcatgtacccatctgagccaagggaactgttgaaatttccttgctaaaagag

SEQ ID NO: 1324 - DNA, 121 bp, synthetic construct
  misc_feature 1..121: note = Description of artificial sequence: synthetic polynucleotide sequence
  source 1..121: mol_type = other DNA
aaacaaggattttacttactatggcatctttaacaatttgtttggccacctgttctggtttgcacacagatgtggtctctgaaataagtcgagtctccaaaggctaaaagtggaaaaacat

SEQ ID NO: 1325 - DNA, 121 bp, synthetic construct
  misc_feature 1..121: note = Description of artificial sequence: synthetic polynucleotide sequence
  source 1..121: mol_type = other DNA
ggacatgtaggatactgacctttgttctgttttcttcggcaaagccaggtgtgtctgtgtctggtgggtaagcaactgtgatgtagacattatatggcttcacctgcatttcaaaacaaca

SEQ ID NO: 1326 - DNA, 193 bp, synthetic construct
  misc_feature 1..193: note = Description of artificial sequence: synthetic polynucleotide sequence
  source 1..193: mol_type = other DNA
cctccatctgcaaagcttctgccaatccccttatggcaaacttggatgcagagtaggctgtgaaaccgaataatcccaactgtcctgcctgggaggacacaaacacgatcctgcccacccggcgctccttcatggtggtgatcacggcccggctggggtacacgctgcccaggtaattgatgctcattaacct

SEQ ID NO: 1327 - DNA, 121 bp, synthetic construct
  misc_feature 1..121: note = Description of artificial sequence: synthetic polynucleotide sequence
  source 1..121: mol_type = other DNA
catttttacttacttcaaaggtactaacttcaagatcttcaaattttcctgacactgccattcctgcacaatttaccagcatgtccactggacccagtttctcctgtgcctagaaaaatgt

SEQ ID NO: 1328 - DNA, 121 bp, synthetic construct
  misc_feature 1..121: note = Description of artificial sequence: synthetic polynucleotide sequence
  source 1..121: mol_type = other DNA
gtgaattccaattagcccaacctcttacttgttttatgacattctctacttggttatagtcttgagatacatcaactgatatgcaaagcaccacctgttaaaaaagaaaaaaagtgatcaa

SEQ ID NO: 1329 - DNA, 121 bp, synthetic construct
  misc_feature 1..121: note = Description of artificial sequence: synthetic polynucleotide sequence
  source 1..121: mol_type = other DNA
acagaaaatgcattctgaagacagagatttacctgtttgtcattaatagagtgcatttcaatttctttctttgcctgcagcagcttatcctgaaagcaatacagaataattagtcgtgatg

SEQ ID NO: 1330 - DNA, 121 bp, synthetic construct
  misc_feature 1..121: note = Description of artificial sequence: synthetic polynucleotide sequence
  source 1..121: mol_type = other DNA
aacctagaagccttacctcatttcgtgcaaccagagttataaaagctccttgtttatagcactcgatagcaatgcacttcccgatgccactggaacctcctgtaacctaaaacaaaatcat

SEQ ID NO: 1331 - DNA, 121 bp, synthetic construct
  misc_feature 1..121: note = Description of artificial sequence: synthetic polynucleotide sequence
  source 1..121: mol_type = other DNA
cactcaccaccacatgcgccccgggcagggcgaggggcttggggctgatgagcggagacaccatgtacagcagcagcacgaaggccacgaggaaggcggcagccagcagcagcatcgctcc

SEQ ID NO: 1332 - DNA, 343 bp, synthetic construct
  misc_feature 1..343: note = Description of artificial sequence: synthetic polynucleotide sequence
  source 1..343: mol_type = other DNA
aatgaagaaaattagtcttaaaaccttacggaaatcttttaacttgaataaaagtaaagaagaaactgatttcatggtagtacaacaaccatcgctagccagtgactttggaaaagatgattccttatttggtagctgctatggtaaagatatggccagctgcgatatcaacggtgaagatgaaaaaggcggaaaaaacagatcaaaaagcgagagcctgatgggtacgctaaaaaggcggctttctgcaaaacagaagtcaaaaggcaaggcgggcacaccctctgggagctctgccgacgaggacaccttctcctcctcctcagcacccatagtctttaaa

SEQ ID NO: 1333 - DNA, 458 bp, synthetic construct
  misc_feature 1..458: note = Description of artificial sequence: synthetic polynucleotide sequence
  source 1..458: mol_type = other DNA
gacgtgagagctcagaggccgataaggtccacgtcgctccgcagccatcactacagtcccgcgccgtggcctctgcggcccacaaactccgaggagacctgcatcaagatggaggtgagagtcaaggccttggttcactcttccagcccgagtccagccctgaatggcgtccggaaggatttccacgacctccagtctgagaccacgtgccaggagcaagccaattcactgaagagctcggcttctcataatggagacctgcatcttcacctggatgaacatgtgcctgtcgttattggacttatgcctcaggactacattcagtatactgtgcctttagatgaggggatgtatcctttggaaggatcacggagctattgtctggacagctcttctcccatggaagtctctgcggttcctcctcaagtgggagggcgcgctttccccgaggatgagag

SEQ ID NO: 1334 - DNA, 458 bp, synthetic construct
  misc_feature 1..458: note = Description of artificial sequence: synthetic polynucleotide sequence
  source 1..458: mol_type = other DNA
tcaggtagaccaggacctagttgtcgccccagagatcttcgtggatcagtccgtgaatggcttgttgattggcaccacgggagtcatgttgcagagcccgagagcgggtcacgatgatgtccctccactctcaccattgctacctccaatgcagaataatcaaatccaaaggaacttcagtggactcactggcacagaagcccacgtggctgaaagtatgcgctgtcatttgaattttgatccgaactctgctcctggggttgcaagagtttatgactcagtgcaaagtagtggtcccatggttgtgacaagccttacagaggagctgaaaaaacttgcaaagcaaggatggtactggggaccaatcacacgttgggaggcagaagggaagctagcaaacgtgccagatggttcttttcttgttcgggacagttctgacgaccgttaccttttaagct

SEQ ID NO: 1335 - DNA, 350 bp, synthetic construct
  misc_feature 1..350: note = Description of artificial sequence: synthetic polynucleotide sequence
  source 1..350: mol_type = other DNA
tgagctttcgctcccatggtaaaacacttcacactagaattgagcactcaaatggtaggtttagcttttatgaacagccagatgtggaaggacatacgtccatagttgatctaattgagcattcaatcagggactctgaaaatggagctttttgttattcaaggtctcggctgcctggatctgcaacttaccccgtcagactgaccaacccagtgtcccggttcatgcaggtgcgctcgttgcagtacctgtgtcgttttgttatacgtcagtataccagaatagacttaattcagaaactgcctttgccaaacaaaatgaaggattatttacaggagaagcactactga

SEQ ID NO: 1336 - DNA, 135 bp, synthetic construct
  misc_feature 1..135: note = Description of artificial sequence: synthetic polynucleotide sequence
  source 1..135: mol_type = other DNA
accttgtcctggatgtccctcagcagggtgatgtactctgaggatgtggggtctggattactgaggttccagttgacaatgtggaaatttatctggtactcgccccggattgataaattctggggtgcatagcct

SEQ ID NO: 1337 - DNA, 121 bp, synthetic construct
  misc_feature 1..121: note = Description of artificial sequence: synthetic polynucleotide sequence
  source 1..121: mol_type = other DNA
aggtgctgaaggaccccctcggtggagttgaatgtagctgagcccttgcccatatctggtgaatactggagattggagatggtgaagttgagtgtgagggtcttcaggtggtaccccatgg

SEQ ID NO: 1338 - DNA, 121 bp, synthetic construct
  misc_feature 1..121: note = Description of artificial sequence: synthetic polynucleotide sequence
  source 1..121: mol_type = other DNA
gaccctgaaggaccctctccgtggtgttgaacttcctggagccagggcgacgcatgtcctcctcatactgcaggttagtgatggtaaaattgagggtgaatggcagcaggacagggccagt

SEQ ID NO: 1339 - DNA, 177 bp, synthetic construct
  misc_feature 1..177: note = Description of artificial sequence: synthetic polynucleotide sequence
  source 1..177: mol_type = other DNA
accattgacatagagactgtttctgtccagggtgtagggacccagctctttgatgccattggtcagctggctcagctcccagtatagctgctccctgtccactccagggcttttggggtcaagacggtgggtgcagatggcatccactccagtggctgctccatccttctcggacct

SEQ ID NO: 1340 - DNA, 177 bp, synthetic construct
  misc_feature 1..177: note = Description of artificial sequence: synthetic polynucleotide sequence
  source 1..177: mol_type = other DNA
accattgacatagagactgttcctgtccagggtgtaggggcccagctcttcaatgtcattggtcagtttgcttagctcccagtacagctgctccctgttgagtccagggcttttggggtcaaggcggtgggtgcagatggcatccactccagtggctgccccatctttctcgggcct

SEQ ID NO: 1341 - DNA, 135 bp, synthetic construct
  misc_feature 1..135: note = Description of artificial sequence: synthetic polynucleotide sequence
  source 1..135: mol_type = other DNA
aggcttcggccagccctcggggagtgcctggcccgtctggcagcagccatgccggtggcgttcctggagccgcagctgaacgagtacaacgcctgctccgtgtacaccaccaagtctccgcgggagcgggccagt

SEQ ID NO: 1342 - DNA, 121 bp, synthetic construct
  misc_feature 1..121: note = Description of artificial sequence: synthetic polynucleotide sequence
  source 1..121: mol_type = other DNA
ttcaggggtgagtttgaggtctgattattgtggcacagatttgaggagtgacaccccgttctgattctgcaccctcactccatccccactctagtttcatccaggatcgagcagggcgaat

SEQ ID NO: 1343 - DNA, 121 bp, synthetic construct
  misc_feature 1..121: note = Description of artificial sequence: synthetic polynucleotide sequence
  source 1..121: mol_type = other DNA
gaggcacccgagctggccctggacccggtgcctcaggatgcgtccaccaagaagctgagcgagtgtctcaagcgcatcggggacgaactggacagtaacatggagctgcagaggtgtgggc

SEQ ID NO: 1344 - DNA, 121 bp, synthetic construct
  misc_feature 1..121: note = Description of artificial sequence: synthetic polynucleotide sequence
  source 1..121: mol_type = other DNA
tggtagggcccgcgacagattctctcagggccagaggcctttgctgggacaccacaggatttgtgagcacttttgattttgctgtgagaactcacccagaacttgaccaggaagaaggcat

SEQ ID NO: 1345 - DNA, 121 bp, synthetic construct
  misc_feature 1..121: note = Description of artificial sequence: synthetic polynucleotide sequence
  source 1..121: mol_type = other DNA
gccacgatcatatagctctcggaggccaccctttttctcagggaatttgtcgtagatctgccggacgtccacactctcgagcggcggcgctccggggctggggcagtgctggctgatgtgc

SEQ ID NO: 1346 - DNA, 203 bp, synthetic construct
  misc_feature 1..203: note = Description of artificial sequence: synthetic polynucleotide sequence
  source 1..203: mol_type = other DNA
gatggatggcaagcggcggccaggcccagggcccggggtgcccccaaagcgggcccgtgggggcctctgggatgatgatgatgcacctcggccatcccaattcgaggaggacctggcactgatggaggagatggaggcagaacacaggctgcaggagcaggaggaggaggagctgcagtcagtcctggagggggttgcagacg

SEQ ID NO: 1347 - DNA, 121 bp, synthetic construct
  misc_feature 1..121: note = Description of artificial sequence: synthetic polynucleotide sequence
  source 1..121: mol_type = other DNA
ccagggcaggtcccaccatcagccatagatcctcgctggcttcggcccacaccaccagcgctggacccccagacagagcccctcatcttccaacagttggagattgaccattatgtgggtg

SEQ ID NO: 1348 - DNA, 148 bp, synthetic construct
  misc_feature 1..148: note = Description of artificial sequence: synthetic polynucleotide sequence
  source 1..148: mol_type = other DNA
ggcccagcgcagcctgtgcctggggggcccccaccatcccgcggctccgtgcctgtgctccgcgccttcggggtcaccgatgaggggttctctgtctgctgccacatccacggcttcgctccctacttctacaccccagcgccccctg

SEQ ID NO: 1349 - DNA, 121 bp, synthetic construct
  misc_feature 1..121: note = Description of artificial sequence: synthetic polynucleotide sequence
  source 1..121: mol_type = other DNA
ttcgggcccgagcacatgggtgacctgcaacgggagctgaacttggccatcagccgggacagtcgcggggggagggagctgactgggccggccgtgctggctgtggaactgtgctcccgag

SEQ ID NO: 1350 - DNA, 170 bp, synthetic construct
  misc_feature 1..170: note = Description of artificial sequence: synthetic polynucleotide sequence
  source 1..170: mol_type = other DNA
ggcatgtttgggtaccacgggcacggcccctccccgttcctgcgcatcaccgtggcgctgccgcgcctcgtggccccggcccgccgtctcctggaacagggcatccgtgtggcaggcctgggcacgcccagcttcgcgccctacgaggccaacgtcgactttgagatccg

SEQ ID NO: 1351 - DNA, 121 bp, synthetic construct
  misc_feature 1..121: note = Description of artificial sequence: synthetic polynucleotide sequence
  source 1..121: mol_type = other DNA
tgacccccagccccctccaggttcatggtggacacggacatcgtcggctgcaactggctggagctcccagctgggaaatacgccctgaggctgaaggagaaggtgcagggcttcccagggc

SEQ ID NO: 1352 - DNA, 121 bp, synthetic construct
  misc_feature 1..121: note = Description of artificial sequence: synthetic polynucleotide sequence
  source 1..121: mol_type = other DNA
cgcagtgccagctggaggcggacgtgctgtggtctgacgtggtcagtcacccaccggaagggccatggcagcgcattgcgcccttgcgcgtgctcagcttcgatatcgagtgcgccggccg

SEQ ID NO: 1353 - DNA, 168 bp, synthetic construct
  misc_feature 1..168: note = Description of artificial sequence: synthetic polynucleotide sequence
  source 1..168: mol_type = other DNA
ggcatcttccctgagcctgagcgggaccctgtcatccagatctgctcgctgggcctgcgctggggggagccggagcccttcctacgcctggcgctcaccctgcggccctgtgcccccatcctgggtgccaaggtgcagagctacgagaaggaggaggacctgctgcag

SEQ ID NO: 1354 - DNA, 121 bp, synthetic construct
  misc_feature 1..121: note = Description of artificial sequence: synthetic polynucleotide sequence
  source 1..121: mol_type = other DNA
acccccaggcctggtccaccttcatccgtatcatggaccccgacgtgatcaccggttacaacatccagaacttcgaccttccgtacctcatctctcgggcccagaccctcaaggtgagggc

SEQ ID NO: 1355 - DNA, 142 bp, synthetic construct
  misc_feature 1..142: note = Description of artificial sequence: synthetic polynucleotide sequence
  source 1..142: mol_type = other DNA
ggtacaaacattccctttcctgggccgtgtggccggcctttgctccaacatccgggactcttcattccagtccaagcagacgggccggcgggacaccaaggttgtcagcatggtgggccgcgtgcagatggacatgctgcag

SEQ ID NO: 1356 - DNA, 121 bp, synthetic construct
  misc_feature 1..121: note = Description of artificial sequence: synthetic polynucleotide sequence
  source 1..121: mol_type = other DNA
cctaggtgctgctgcgggagtacaagctccgctcctacacgctcaatgccgtgagcttccacttcctgggcgagcagaaggaggacgtgcagcacagcatcatcaccgacctgcaggtgcc

SEQ ID NO: 1357 - DNA, 193 bp, synthetic construct
  misc_feature 1..193: note = Description of artificial sequence: synthetic polynucleotide sequence
  source 1..193: mol_type = other DNA
gaatgggaacgaccagacccgccgccgcctggctgtgtactgcctgaaggatgcctacctgccactgcggctgctggagcggctcatggtgctggtgaacgccgtggagatggcgagggtcactggcgtgcccctcagctacctgctcagtcgtggccagcaggtcaaggtcgtatcccagctgttgcggcag

SEQ ID NO: 1358 - DNA, 121 bp, synthetic construct
  misc_feature 1..121: note = Description of artificial sequence: synthetic polynucleotide sequence
  source 1..121: mol_type = other DNA
ccttctcccctcccaggccatgcacgaggggctgctgatgcccgtggtgaagtcagagggcggcgaggactacacgggagccactgtcatcgagcccctcaaagggtgaggccccaggctg

SEQ ID NO: 1359 - DNA, 121 bp, synthetic construct
  misc_feature 1..121: note = Description of artificial sequence: synthetic polynucleotide sequence
  source 1..121: mol_type = other DNA
aggtactacgacgtccccatcgccaccctggacttctcctcgctgtacccgtccatcatgatggcccacaacctgtgttacaccacgctccttcggcccgggactgcacagaaactggggt

SEQ ID NO: 1360 - DNA, 121 bp, synthetic construct
  misc_feature 1..121: note = Description of artificial sequence: synthetic polynucleotide sequence
  source 1..121: mol_type = other DNA
ccagcctgactgaggatcagttcatcaggacccccaccggggacgagtttgtgaagacctcagtgcggaaggggctgctgccccagatcctggagaacctgctcagtgcccggaagaggtg

SEQ ID NO: 1361 - DNA, 149 bp, synthetic construct
  misc_feature 1..149: note = Description of artificial sequence: synthetic polynucleotide sequence
  source 1..149: mol_type = other DNA
gggccaaggccgagctggccaaggagacagaccccctccggcgccaggtcctggatggacggcagctggcgctgaaggtgagcgccaactccgtatacggcttcactggcgcccaggtgggcaagttgccgtgcctggagatctcacag

SEQ ID NO: 1362 - DNA, 121 bp, synthetic construct
  misc_feature 1..121: note = Description of artificial sequence: synthetic polynucleotide sequence
  source 1..121: mol_type = other DNA
ctctccccgacagagcgtcacggggttcggacgtcagatgatcgagaaaaccaagcagctggtggagtctaagtacacagtggagaatggctacagcaccagtgccaaggtcgggggctgc

SEQ ID NO: 1363 - DNA, 139 bp, synthetic construct
  misc_feature 1..139: note = Description of artificial sequence: synthetic polynucleotide sequence
  source 1..139: mol_type = other DNA
ggtggtgtatggtgacactgactccgtcatgtgccgattcggcgtgtcctcggtggctgaggcgatggccctggggcgggaggccgcggactgggtgtcaggtcacttcccgtcgcccatccggctggagtttgagaag

SEQ ID NO: 1364 - DNA, 177 bp, synthetic construct
  misc_feature 1..177: note = Description of artificial sequence: synthetic polynucleotide sequence
  source 1..177: mol_type = other DNA
ggtctacttcccatacctgcttatcagcaagaagcgctacgcgggcctgctcttctcctcccggcccgacgcccacgaccgcatggactgcaagggcctggaggccgtgcgcagggacaactgccccctcgtggccaacctggtcactgcctcactgcgccgcctgctcatcgaccg

SEQ ID NO: 1365 - DNA, 154 bp, synthetic construct
  misc_feature 1..154: note = Description of artificial sequence: synthetic polynucleotide sequence
  source 1..154: mol_type = other DNA
gagaccctgagggcgcggtggctcacgcacaggacgtcatctcggacctgctgtgcaaccgcatcgatatctcccagctggtcatcaccaaggagctgacccgcgcggcctccgactatgccggcaagcaggcccacgtggagctggccgagag

SEQ ID NO: 1366 - DNA, 121 bp, synthetic construct
  misc_feature 1..121: note = Description of artificial sequence: synthetic polynucleotide sequence
  source 1..121: mol_type = other DNA
tccacgcaggatgaggaagcgggaccccgggagtgcgcccagcctgggcgaccgcgtcccctacgtgatcatcagtgccgccaagggtgtggccgcctacatgaagtcggaggtcaggccc

SEQ ID NO: 1367 - DNA, 134 bp, synthetic construct
  misc_feature 1..134: note = Description of artificial sequence: synthetic polynucleotide sequence
  source 1..134: mol_type = other DNA
ggacccgctgttcgtgctggagcacagcctgcccattgacacgcagtactacctggagcagcagctggccaagcccctcctgcgcatcttcgagcccatcctgggcgagggccgtgccgaggctgtgctactgc

SEQ ID NO: 1368 - DNA, 121 bp, synthetic construct
  misc_feature 1..121: note = Description of artificial sequence: synthetic polynucleotide sequence
  source 1..121: mol_type = other DNA
gcagggggggaccacacgcgctgcaagacggtgctcacgggcaaggtgggcggcctcctggccttcgccaaacgccgcaactgctgcattggctgccgcacagtgctcagccaccagggtg

SEQ ID NO: 1369 - DNA, 121 bp, synthetic construct
  misc_feature 1..121: note = Description of artificial sequence: synthetic polynucleotide sequence
  source 1..121: mol_type = other DNA
gccccagcacttgggctgacccgcctccccacaggagccgtgtgtgagttctgccagccccgggagtctgagctgtatcagaaggaggtgagagggccgggaggtgaggaggggccaggtg

SEQ ID NO: 1370 - DNA, 121 bp, synthetic construct
  misc_feature 1..121: note = Description of artificial sequence: synthetic polynucleotide sequence
  source 1..121: mol_type = other DNA
tgccgtccccaggtatcccatctgaatgccctggaggagcgcttctcgcgcctctggacgcagtgccagcgctgccagggcagcctgcacgaggacgtcatctgcaccaggtgtgtgccat

SEQ ID NO: 1371 - DNA, 121 bp, synthetic construct
  misc_feature 1..121: note = Description of artificial sequence: synthetic polynucleotide sequence
  source 1..121: mol_type = other DNA
acccgcagccgggactgccccatcttctacatgcgcaagaaggtgcggaaggacctggaagaccaggagcagctcctgcggcgcttcggaccccctggacctgaggcctggtgaccttgca

SEQ ID NO: 1372 - DNA, 121 bp, synthetic construct
  misc_feature 1..121: note = Description of artificial sequence: synthetic polynucleotide sequence
  source 1..121: mol_type = other DNA
aaaagataaaatcatccctgaaatcttatgctttcttctcatcccagttgccaaagctctgcaggaatttgacttggccttaagaggaaagaagaaaaggaagaagtttatgaaggatgcc

SEQ ID NO: 1373 - DNA, 121 bp, synthetic construct
  misc_feature 1..121: note = Description of artificial sequence: synthetic polynucleotide sequence
  source 1..121: mol_type = other DNA
agggggagatgacagtgagtggcctcccttttggagtttgggcccactcggtggggtgggtcagagtggcctggtgtgttccacactcacacctccccactccccctaggcagaggaaagg

SEQ ID NO: 1374 - DNA, 121 bp, synthetic construct
  misc_feature 1..121: note = Description of artificial sequence: synthetic polynucleotide sequence
  source 1..121: mol_type = other DNA
aggaggcgcagcagccgccctggcccgtcatggagatggaaaaggagttcgagcagatcgacaagtccgggagctgggcggccatttaccaggtgcgggagcgccccggagcgtggcgggc

SEQ ID NO: 1375 - DNA, 121 bp, synthetic construct
  misc_feature 1..121: note = Description of artificial sequence: synthetic polynucleotide sequence
  source 1..121: mol_type = other DNA
tattcttttttgtaggatatccgacatgaagccagtgacttcccatgtagagtggccaagcttcctaagaacaaaaaccgaaataggtacagagacgtcagtccctgtaagtatccacgtg

SEQ ID NO: 1376 - DNA, 121 bp, synthetic construct
  misc_feature 1..121: note = Description of artificial sequence: synthetic polynucleotide sequence
  source 1..121: mol_type = other DNA
tgtctttcagttgaccatagtcggattaaactacatcaagaagataatgactatatcaacgctagtttgataaaaatggaagaagcccaaaggagttacattcttacccaggtaagcagat

SEQ ID NO: 1377 - DNA, 121 bp, synthetic construct
  misc_feature 1..121: note = Description of artificial sequence: synthetic polynucleotide sequence
  source 1..121: mol_type = other DNA
tgtctttgcagggccctttgcctaacacatgcggtcacttttgggagatggtgtgggagcagaaaagcaggggtgtcgtcatgctcaacagagtgatggagaaaggttcggtaagtctcgg

SEQ ID NO: 1378 - DNA, 139 bp, synthetic construct
  misc_feature 1..139: note = Description of artificial sequence: synthetic polynucleotide sequence
  source 1..139: mol_type = other DNA
gttaaaatgcgcacaatactggccacaaaaagaagaaaaagagatgatctttgaagacacaaatttgaaattaacattgatctctgaagatatcaagtcatattatacagtgcgacagctagaattggaaaaccttaca

SEQ ID NO: 1379 - DNA, 211 bp, synthetic construct
  misc_feature 1..211: note = Description of artificial sequence: synthetic polynucleotide sequence
  source 1..211: mol_type = other DNA
gacccaagaaactcgagagatcttacatttccactataccacatggcctgactttggagtccctgaatcaccagcctcattcttgaactttcttttcaaagtccgagagtcagggtcactcagcccggagcacgggcccgttgtggtgcactgcagtgcaggcatcggcaggtctggaaccttctgtctggctgatacctgcctcttgctg

SEQ ID NO: 1380 - DNA, 163 bp, synthetic construct
  misc_feature 1..163: note = Description of artificial sequence: synthetic polynucleotide sequence
  source 1..163: mol_type = other DNA
gatggacaagaggaaagacccttcttccgttgatatcaagaaagtgctgttagaaatgaggaagtttcggatggggctgatccagacagccgaccagctgcgcttctcctacctggctgtgatcgaaggtgccaaattcatcatgggggactcttccgtgcag

SEQ ID NO: 1381 - DNA, 225 bp, synthetic construct
  misc_feature 1..225: note = Description of artificial sequence: synthetic polynucleotide sequence
  source 1..225: mol_type = other DNA
ggatcagtggaaggagctttcccacgaggacctggagcccccacccgagcatatccccccacctccccggccacccaaacgaatcctggagccacacaatgggaaatgcagggagttcttcccaaatcaccagtgggtgaaggaagagacccaggaggataaagactgccccatcaaggaagaaaaaggaagccccttaaatgccgcaccctacggcatcgaaag

SEQ ID NO: 1382 - DNA, 197 bp, synthetic construct
  misc_feature 1..197: note = Description of artificial sequence: synthetic polynucleotide sequence
  source 1..197: mol_type = other DNA
gcatgagtcaagacactgaagttagaagtcgggtcgtggggggaagtcttcgaggtgcccaggctgcctccccagccaaaggggagccgtcactgcccgagaaggacgaggaccatgcactgagttactggaagcccttcctggtcaacatgtgcgtggctacggtcctcacggccggcgcttacctctgctacagg

SEQ ID NO: 1383 - DNA, 121 bp, synthetic construct
  misc_feature 1..121: note = Description of artificial sequence: synthetic polynucleotide sequence
  source 1..121: mol_type = other DNA
tctgcaggtgcgggtctgggctcatctgaactgtttggtttcattccagttcctgttcaacagcaacacatagcctgaccctcctccactccacctccacccactgtccgcctctgcccgc

SEQ ID NO: 1384 - DNA, 121 bp, synthetic construct
  misc_feature 1..121: note = Description of artificial sequence: synthetic polynucleotide sequence
  source 1..121: mol_type = other DNA
gcgctcatcattctcagatgcattcttccactgtgactggtccttagaccaaaacccttcaacttttccataggaactattcttccatttcaactgctctctgtcaccttgcatggtagcc

SEQ ID NO: 1385 - DNA, 121 bp, synthetic construct
  misc_feature 1..121: note = Description of artificial sequence: synthetic polynucleotide sequence
  source 1..121: mol_type = other DNA
tggcagctggcttactgctccttgcatcttcgctttgggaagactcgtcagaccaggttcctggtttcatttcgcaggtattgtcctcaaagtctgacacttgttgggatccaggcccact

SEQ ID NO: 1386 - DNA, 121 bp, synthetic construct
  misc_feature 1..121: note = Description of artificial sequence: synthetic polynucleotide sequence
  source 1..121: mol_type = other DNA
agtgaatcaagtttttttgtcatttggtcgataatgtgcattcccaataaaattctcatagtttctcttttgtgccatgctgttagataagtgttgatatgacacaggcctttttcctgat

SEQ ID NO: 1387 - DNA, 239 bp, synthetic construct
  misc_feature 1..239: note = Description of artificial sequence: synthetic polynucleotide sequence
  source 1..239: mol_type = other DNA
ccttctaacgtcgagctggatgctggactaccagcaggcacacaagtgtaaagtggcccggagccaccatagggcttctgaacagtcagcacatttggagaatcgacctcgctggagctcaggaaccttggtttgggaggcagcgcctgcgacggatacacacagtcctgcggtaacagtgatgtgatgcctctgaccatatggtacttgggaaggtcatagcctcttctgtaattggc

SEQ ID NO: 1388 - DNA, 478 bp, synthetic construct
  misc_feature 1..478: note = Description of artificial sequence: synthetic polynucleotide sequence
  source 1..478: mol_type = other DNA
cccgggctggtcaacgtcaagggcaaccacgctggacttcagtctttttggaaggggctcaccaaattctgctgcagtattgctggcactccgattacagaaatagtctcttcccggaggtgcccacgggctgtcgttcttggcggggtagtcgatggaaccattgatgttactgctgccgagggtgggctgagaaggagctactggaagaggtttcaattttgtctcgggtctttttgtcttatccggtgcaggggaaacactggttttaggaaacatctcagattgctgttgcctggtggcggccccttggacccccacattctgctgtggtctgtgggacttcaggttacttggggctaaagtgctagagtctatccctgaagtcagaggggccttgcctggcccaggagggctctgcttccccttcgcagatggcagggatttggactgcgccgggaaagcagacttgggcttg

SEQ ID NO: 1389 - DNA, 478 bp, synthetic construct
  misc_feature 1..478: note = Description of artificial sequence: synthetic polynucleotide sequence
  source 1..478: mol_type = other DNA
ggtttacagaaactagagaggggaggcacatcttttcccagcaacgctggcgggcatccggtacgtcgacttctaagcaaggacttgtttcgacagtttttatgaacgtcaggattgtatttatgctccagtctctggtgcatcattaaaacttctggataaaatgtcttgaaggtacaaaatggacaggtgatacttggaatcaaacttttactcaaagaaattgccgggcaattgtgaagagcccccacggataaatttaaaggtttttcgtgacaatccacacttggcctgtatctgcagtcagctgcggtctccgtttgcttctctttggggctaacttcaaggttatgggtggtactgccatccggaggaggagtaacatccgccttggttctacagatgaggttatttgcctgagtttcaactgctgatctcttttttaacaggtccaggtaagcaggggtagggtttttat

SEQ ID NO: 1390 - DNA, 360 bp, synthetic construct
  misc_feature 1..360: note = Description of artificial sequence: synthetic polynucleotide sequence
  source 1..360: mol_type = other DNA
tcactttatcagcactgtcatcagctgcatttttatggaaatcctgagtatctttgtgtgctggtgagaggacagcgctgcccagaacattctgaaaaacagaaggcatctccttaagctgctttgcaggtggactgcctgtaacatctttggcaccatcaaaaaatcttttcaaatttttggtttgcgcactgtcagcggttaatagtgcatcttcagtgtcctgatttttaccatcgttcttgacttcagcagcaacatcggtttgtttttccttgtgatgtctctccaagtgatacctcagagatgtcttctgggctgcagcatattcacaaaattcacatttgtatggtttttcac

SEQ ID NO: 1391 - DNA, 121 bp, synthetic construct
  misc_feature 1..121: note = Description of artificial sequence: synthetic polynucleotide sequence
  source 1..121: mol_type = other DNA
acctgtatgcgttctgagatgaatattgaggtaataatttgaacggaaaaactttccacaataactacactctcttgaagatgtaagatgttttatttttcctccatcatcatttttatct

SEQ ID NO: 1392 - DNA, 453 bp, synthetic construct
  misc_feature 1..453: note = Description of artificial sequence: synthetic polynucleotide sequence
  source 1..453: mol_type = other DNA
cccagatggattccttcgggaagcccatcctcagatccgtcttcagaaccaccttcccctcgatccacggctccattttcatccagaggggcggcgaggtcaggagaacacgtccccggctgcctcccgtccacagacatggtgggcgactccgcgccggccctccggtccttcttgtggaccctggagtgcaagaccagctggtggtaggttctgaaagctttgccgcactcggagcagtgagtgggcttctccttgctactgggtaacttgggatccgcgtccacggagggcgcttcgccgtgggagtgtttgcacttctctttctcttgcgagaggcctgcacaactgcccttatttgtttctccaagctccttctcggaactcgaatcgtcgttgtcggtgctcccttcttgccccgattccttcacttcttggcaaatggcaactttt

SEQ ID NO: 1393 - DNA, 453 bp, synthetic construct
  misc_feature 1..453: note = Description of artificial sequence: synthetic polynucleotide sequence
  source 1..453: mol_type = other DNA
cctttggtagccagctgccaagcctggaaggtggtgaacggatcgagctgagggatgcatctgacaggcttcttccccgtttcagggtgagattttggtctcaagttgaacaactgcaggaagtcctccctcgaggacggcattcctccttgtggagagtctgtctgcgcgctgctggtaccgaaagcagtttttttggtgtgcaccttgcggtgctcaattagactttctttatttggaaataggaagccacaaaccatgcagattttgtaaggagaggagatgctctcggccgcgtgcacctggacgacctcgttgatcgttgctggactactctccaagccttgctgcagtttgcttctggcccccgatttgccattatgtgtccgcatgtgatttttaagaaaccaaggctccttgaatcttcttccgcacatgttacacccgtaagtg

SEQ ID NO: 1394 - DNA, 461 bp, synthetic construct
  misc_feature 1..461: note = Description of artificial sequence: synthetic polynucleotide sequence
  source 1..461: mol_type = other DNA
aaagaatctttgtgtgttctcatgtggatctcaacatcaaaagcgactctaaatgtctgcccacatacctcacagctaaattcattttccttgcaattcttttccttgggaggttctgttcgcacttgacttttatcaagcggactgagatactctgcttcaacccgaagaactgctggttcacagagggtaggccggtgttgcattaagacatgtttattaaggtcttctgaatgtgtgaaggtctggctgcagaacatgcaatccaagggcatatacccctcgatttggatgacatttttttcttgtgtagctcggaatggaacaacagcggtccctttcattgacaaggcatcctccatctccatcggactgccaagagagctgccaatcacttctggcccatccatgtacattaagagggattgagttggcatgtttcctgtcactttcgattgcat

SEQ ID NO: 1395 - DNA, 238 bp, synthetic construct
  misc_feature 1..238: note = Description of artificial sequence: synthetic polynucleotide sequence
  source 1..238: mol_type = other DNA
catgctgctgcagcccgcgccgtgcgccccgagcgcgggcttcccgcggcccctggccgcccccggcgccatgcacggctcgcagaaggacaccacgttcaccaagatcttcgtgggcggcctgccgtaccacactaccgacgcctcgctcaggaagtacttcgagggcttcggcgacatcgaggaggccgtggtcatcaccgaccgccagacgggcaagtcccgcggctacggcttc

SEQ ID NO: 1396 - DNA, 121 bp, synthetic construct
  misc_feature 1..121: note = Description of artificial sequence: synthetic polynucleotide sequence
  source 1..121: mol_type = other DNA
tgaccatggccgaccgggcggcagctgagagggcttgcaaagacccgaaccccatcatcgacggccgcaaggccaacgtgaacctggcatatctgggcgccaagccgcggagcctccagac

SEQ ID NO: 1397 - DNA, 121 bp, synthetic construct
  misc_feature 1..121: note = Description of artificial sequence: synthetic polynucleotide sequence
  source 1..121: mol_type = other DNA
aaggccaagtccctgattgttctctcgttttaggctttgccattggggtgcagcagctgcaccccaccttgatccagcggacttacgggtgagtggacatggctggcttggggtgggtagt

SEQ ID NO: 1398 - DNA, 305 bp, synthetic construct
  misc_feature 1..305: note = Description of artificial sequence: synthetic polynucleotide sequence
  source 1..305: mol_type = other DNA
ggctgaccccgcactacatctacccaccagccatcgtgcagcccagcgtggtgatcccagccgcccctgtcccgtcgctgtcctcgccctacattgagtacacgccggccagcccggcctacgcccagtacccaccggccacctatgaccagtacccatacgccgcctcgcctgccacggctgccagcttcgtgggctacagctaccctgccgccgtgccccaggccctctcagccgcagcacccgcgggcaccactttcgtgcagtaccaggcgccgcagctgcagcctgacaggatgcagtga

SEQ ID NO: 1399 - DNA, 121 bp, synthetic construct
  misc_feature 1..121: note = Description of artificial sequence: synthetic polynucleotide sequence
  source 1..121: mol_type = other DNA
aattaaacaaggtattacacatgttaaatgtgtagcaattaatcaagtttctttctttcttatgttatcaagtaggcatcttatggatatgcagaaatcaaaacacattgaaagctcacca

SEQ ID NO: 1400 - DNA, 121 bp, synthetic construct
  misc_feature 1..121: note = Description of artificial sequence: synthetic polynucleotide sequence
  source 1..121: mol_type = other DNA
tgtttcgaatcccaggaattaagctcagaagtcaattctttctctgcttttctatgactttgcacatttttgctagcagatggatttttatcgcaagtagcagtattcacatcttttgaca

SEQ ID NO: 1401 - DNA, 121 bp, synthetic construct
  misc_feature 1..121: note = Description of artificial sequence: synthetic polynucleotide sequence
  source 1..121: mol_type = other DNA
ggaagatggtttctacgatagtcaaaggaaaacagttcattgagttgtcactaattgtaaatgtttatcagcctagagaaactaagactgaaagaagacaaaaaattgaagagaaagatcc

SEQ ID NO: 1402 - DNA, 121 bp, synthetic construct
  misc_feature 1..121: note = Description of artificial sequence: synthetic polynucleotide sequence
  source 1..121: mol_type = other DNA
agaagcaaaaaagttagcacaagaaagaatggaggaggacttaagagaaagtaatccacccaaaaatgaagagcagaaaggtatgcagaagccaaaggcatgataagaataatatactctc

SEQ ID NO: 1403 - DNA, 121 bp, synthetic construct
  misc_feature 1..121: note = Description of artificial sequence: synthetic polynucleotide sequence
  source 1..121: mol_type = other DNA
cctgtctttcatccatttgactgcaggagaagggtccccaacagccttacaaggcaagacaatgtctttcatccatggagtagtcactgtcccactgaaggtcaggattcgtgcaggagct

SEQ ID NO: 1404 - DNA, 207 bp, synthetic construct
  misc_feature 1..207: note = Description of artificial sequence: synthetic polynucleotide sequence
  source 1..207: mol_type = other DNA
aatgagacccaagacaggccaagtgggttgtgagacccctgaggagctgggccctggtcccaggcagcgctggcccctgctgctgctgggtctggccatggtcgcccatggcctgctgcgcccaatggttgcaccgcaaagcggggacccagaccctggagcctcagttggaagcagccgatccagcctgcggagcctgtggggcag

SEQ ID NO: 1405 - DNA, 121 bp, synthetic construct
  misc_feature 1..121: note = Description of artificial sequence: synthetic polynucleotide sequence
  source 1..121: mol_type = other DNA
ggctcctgctccagcccagcccccagagagcagaccccaggtgctggccccgggggttttggtctgagcctcagtcactgtgttatgtcttcggaactgggaccaaggtcaccgtcctagg

SEQ ID NO: 1406 - DNA, 321 bp, synthetic construct
  misc_feature 1..321: note = Description of artificial sequence: synthetic polynucleotide sequence
  source 1..321: mol_type = other DNA
ggtcagcccaaggccaaccccactgtcactctgttcccgccctcctctgaggagctccaagccaacaaggccacactagtgtgtctgatcagtgacttctacccgggagctgtgacagtggcctggaaggcagatggcagccccgtcaaggcgggagtggagaccaccaaaccctccaaacagagcaacaacaagtacgcggccagcagctacctgagcctgacgcccgagcagtggaagtcccacagaagctacagctgccaggtcacgcatgaagggagcaccgtggagaagacagtggcccctacagaatgttcatag

SEQ ID NO: 1407 - DNA, 121 bp, synthetic construct
  misc_feature 1..121: note = Description of artificial sequence: synthetic polynucleotide sequence
  source 1..121: mol_type = other DNA
cctgtccagagctgaccagggagatggtgctggcccaggggctgctctccatggccctgctggccctgtgctgggagcgcagcctggcaggggcagaaggtgagtcccgtggctcccaccc

SEQ ID NO: 1408 - DNA, 121 bp, synthetic construct
  misc_feature 1..121: note = Description of artificial sequence: synthetic polynucleotide sequence
  source 1..121: mol_type = other DNA
aaccatcccgctgcagaccctgcgctgctacaacgactacaccagccacatcacctgcaggtgggcagacacccaggatgcccagcggctcgtcaacgtgaccctcattcgccgggtgaat

SEQ ID NO: 1409 - DNA, 192 bp, synthetic construct
  misc_feature 1..192: note = Description of artificial sequence: synthetic polynucleotide sequence
  source 1..192: mol_type = other DNA
gggacctcctggagccagtgtcctgtgacctcagtgatgacatgccctggtcagcctgcccccatccccgctgcgtgcccaggagatgtgtcattccctgccagagttttgtcgtcactgacgttgactacttctcattccaaccagacaggcctctgggcacccggctcaccgtcactctgacccagcatg

SEQ ID NO: 1410 - DNA, 159 bp, synthetic construct
  misc_feature 1..159: note = Description of artificial sequence: synthetic polynucleotide sequence
  source 1..159: mol_type = other DNA
gtccagcctcctgagcccagggacctgcagatcagcaccgaccaggaccacttcctgctgacctggagtgtggcccttgggagtccccagagccactggttgtccccaggggatctggagtttgaggtggtctacaagcggcttcaggactcttgggag

SEQ ID NO: 1411 - DNA, 170 bp, synthetic construct
  misc_feature 1..170: note = Description of artificial sequence: synthetic polynucleotide sequence
  source 1..170: mol_type = other DNA
ggacgcagccatcctcctctccaacacctcccaggccaccctggggccagagcacctcatgcccagcagcacctacgtggcccgagtacggacccgcctggccccaggttctcggctctcaggacgtcccagcaagtggagcccagaggtttgctgggactcccagccag

SEQ ID NO: 1412 - DNA, 137 bp, synthetic construct
  misc_feature 1..137: note = Description of artificial sequence: synthetic polynucleotide sequence
  source 1..137: mol_type = other DNA
ggggatgaggcccagccccagaacctggagtgcttctttgacggggccgccgtgctcagctgctcctgggaggtgaggaaggaggtggccagctcggtctcctttggcctattctacaagcccagcccagatgcagg

SEQ ID NO: 1413 - DNA, 159 bp, synthetic construct
  misc_feature 1..159: note = Description of artificial sequence: synthetic polynucleotide sequence
  source 1..159: mol_type = other DNA
gggaggaagagtgctccccagtgctgagggaggggctcggcagcctccacaccaggcaccactgccagattcccgtgcccgaccccgcgacccacggccaatacatcgtctctgttcagccaaggagggcagagaaacacataaagagctcagtgaaca

SEQ ID NO: 1414 - DNA, 141 bp, synthetic construct
  misc_feature 1..141: note = Description of artificial sequence: synthetic polynucleotide sequence
  source 1..141: mol_type = other DNA
gtccagatggcccctccatccctcaacgtgaccaaggatggagacagctacagcctgcgctgggaaacaatgaaaatgcgatacgaacacatagaccacacatttgagatccagtacaggaaagacacggccacgtggaag

SEQ ID NO: 1415 - DNA, 164 bp, synthetic construct
  misc_feature 1..164: note = Description of artificial sequence: synthetic polynucleotide sequence
  source 1..164: mol_type = other DNA
ggacagcaagaccgagaccctccagaacgcccacagcatggccctgccagccctggagccctccaccaggtactgggccagggtgagggtcaggacctcccgcaccggctacaacgggatctggagcgagtggagtgaggcgcgctcctgggacaccgagtcgg

SEQ ID NO: 1416 - DNA, 121 bp, synthetic construct
  misc_feature 1..121: note = Description of artificial sequence: synthetic polynucleotide sequence
  source 1..121: mol_type = other DNA
cccggctgctggaagtgctgcctatgtgggtgctggccctcatcgtgatcttcctcaccatcgctgtgctcctggccctccgcttctgtggcatctacgggtacaggtgaggggactctgt

SEQ ID NO: 1417 - DNA, 121 bp, synthetic construct
  misc_feature 1..121: note = Description of artificial sequence: synthetic polynucleotide sequence
  source 1..121: mol_type = other DNA
ctgatggctgtcacctccgtggtgtcttccaggctgcgcagaaagtgggaggagaagatccccaaccccagcaagagccacctgttccaggtaggaactggctgcgaggggcggagtgggg

SEQ ID NO: 1418 - DNA, 121 bp, synthetic construct
  misc_feature 1..121: note = Description of artificial sequence: synthetic polynucleotide sequence
  source 1..121: mol_type = other DNA
ctcttgcagaacgggagcgcagagctttggcccccaggcagcatgtcggccttcactagcgggagtcccccacaccaggggccgtggggcagccgcttccctgagctggaggggtgagtgg

SEQ ID NO: 1419 - DNA, 335 bp, synthetic construct
  misc_feature 1..335: note = Description of artificial sequence: synthetic polynucleotide sequence
  source 1..335: mol_type = other DNA
gggtgttccctgtaggattcggggacagcgaggtgtcacctctcaccatagaggaccccaagcatgtctgtgatccaccatctgggcctgacacgactccagctgcctcagatctacccacagagcagccccccagcccccagccaggcccgcctgccgcctcccacacacctgagaaacaggcttccagctttgacttcaatgggccctacctggggccgccccacagccgctccctacctgacatcctgggccagccggagcccccacaggagggtgggagccagaagtccccacctccagggtccctggagtacctgtgtctgcctgctggg

SEQ ID NO: 1420 - DNA, 447 bp, synthetic construct
  misc_feature 1..447: note = Description of artificial sequence: synthetic polynucleotide sequence
  source 1..447: mol_type = other DNA
gggcaggtgcaactggtccctctggcccaggcgatgggaccaggacaggccgtggaagtggagagaaggccgagccagggggctgcagggagtccctccctggagtccgggggaggccctgcccctcctgctcttgggccaagggtgggaggacaggaccaaaaggacagccctgtggctatacccatgagctctggggacactgaggaccctggagtggcctctggttatgtctcctctgcagacctggtattcaccccaaactcaggggcctcgtctgtctccctagttccctctctgggcctcccctcagaccagacccccagcttatgtcctgggctggccagtggaccccctggagccccaggccctgtgaagtcagggtttgagggctatgtggagctccctccaattgagggccggtcccccaggtcaccaaggaacaat

SEQ ID NO: 1421 - DNA, 345 bp, synthetic construct
  misc_feature 1..345: note = Description of artificial sequence: synthetic polynucleotide sequence
  source 1..345: mol_type = other DNA
cctgtcccccctgaggccaaaagccctgtcctgaacccaggggaacgcccggcagatgtgtccccaacatccccacagcccgagggcctccttgtcctgcagcaagtgggcgactattgcttcctccccggcctggggcccggccctctctcgctccggagtaaaccttcttccccgggacccggtcctgagatcaagaacctagaccaggcttttcaagtcaagaagcccccaggccaggctgtgccccaggtgcccgtcattcagctcttcaaagccctgaagcagcaggactacctgtctctgcccccttgggaggtcaacaagcctggggaggtgtgttga

SEQ ID NO: 1422 - DNA, 121 bp, synthetic construct
  misc_feature 1..121: note = Description of artificial sequence: synthetic polynucleotide sequence
  source 1..121: mol_type = other DNA
tgtagagagagaacttgttcctgtttttatagtataatagttggtatttttaattttttgtgatcaatttgcagttgaagttttttaaagataccgagatagcaaaaattaaaatggaagc

SEQ ID NO: 1423 - DNA, 121 bp, synthetic construct
  misc_feature 1..121: note = Description of artificial sequence: synthetic polynucleotide sequence
  source 1..121: mol_type = other DNA
agtatgaaaaggagttaaccatgttccagaatgattttgaaaaagcttgtcaagcaaaatctgaagctctcgttcttcgggaaaagagtacccttgaaagaattcacaagcaccaagaggt

SEQ ID NO: 1424 - DNA, 121 bp, synthetic construct
  misc_feature 1..121: note = Description of artificial sequence: synthetic polynucleotide sequence
  source 1..121: mol_type = other DNA
cttcattatcctccttgtcattttcctaatctggagatgcttcctaagaaacaaaactcgtagacagacagtgactgaaggccacattcctttccctcagcaccttaatattatcacccca

SEQ ID NO: 1425 - DNA, 121 bp, synthetic construct
  misc_feature 1..121: note = Description of artificial sequence: synthetic polynucleotide sequence
  source 1..121: mol_type = other DNA
caccagatgaagtgtttgacagcagtggattgtctccaggctttctgggatatgtagttgggcgctcagattccgtctctactcgcctgtccaattgtgatcccccgccaacctatgagga

SEQ ID NO: 1426 - DNA, 121 bp, synthetic construct
  misc_feature 1..121: note = Description of artificial sequence: synthetic polynucleotide sequence
  source 1..121: mol_type = other DNA
ttcaaacttctgttcagcagggacgtgagtggacaatggtgactgatagttggaaatatcagcaaacatcttaaattttatactcaaatgaatgagcaatgaaccaggagaataggtccag

SEQ ID NO: 1427 - DNA, 121 bp, synthetic construct
  misc_feature 1..121: note = Description of artificial sequence: synthetic polynucleotide sequence
  source 1..121: mol_type = other DNA
tggctccttgtaatttttacctttttacttaaaattacagcatctttttcaatgagtgcctatgtgactgtgacttattacaatgaaaccagcaactacactgcaatagagacatgtgaat

SEQ ID NO: 1428 - DNA, 121 bp, synthetic construct
  misc_feature 1..121: note = Description of artificial sequence: synthetic polynucleotide sequence
  source 1..121: mol_type = other DNA
tttcaggcccggttcccgcactttgaaatcaccaccatgcccaaggccgagttctacaggcaggtggcctccagtcagctgctgacccctgccgagaggcctggaggcttggacgacagat

SEQ ID NO: 1429 - DNA, 121 bp, synthetic construct
  misc_feature 1..121: note = Description of artificial sequence: synthetic polynucleotide sequence
  source 1..121: mol_type = other DNA
caggctcctctgagactgtggagctggtgcggtacgagccagacctacttcggctcctagggtccgaggtggaattccagtcttgcaacagttgaccgggaaaacagcccctcctcttctt

SEQ ID NO: 1430 - DNA, 121 bp, synthetic construct
  misc_feature 1..121: note = Description of artificial sequence: synthetic polynucleotide sequence
  source 1..121: mol_type = other DNA
ctggcttaggattcttcatttttgtgtttcactgtgtgatgaaggagagtgtgcgggagcagtggcagatacacctctgctgtgggtggttgcgattggataactcttctggtaagatgtc

SEQ ID NO: 1431 - DNA, 120 bp, synthetic construct
  misc_feature 1..120: note = Description of artificial sequence: synthetic polynucleotide sequence
  source 1..120: mol_type = other DNA
agacctcatcctgctcattattgctctctatctacaacaaaactggtggactctattggttgatctcctttggctcctcctgtttctggcgattttaatctggatgtattaccatggaca

SEQ ID NO: 1432 - DNA, 120 bp, synthetic construct
  misc_feature 1..120: note = Description of artificial sequence: synthetic polynucleotide sequence
  source 1..120: mol_type = other DNA
tctacaacaaaactggtggactctattggttgatctcctttggctcctcctgtttatggccattttaatctggatgtattttcatggaccacgacacactgatgaacaccaccacgatga

SEQ ID NO: 1433 - DNA, 120 bp, synthetic construct
  misc_feature 1..120: note = Description of artificial sequence: synthetic polynucleotide sequence
  source 1..120: mol_type = other DNA
atcgctctctggaatttgcacggacaggcattgtaccttggaattgtgctgttcatctttggctgcttacttggtaagatctaacattccctaggacttatttaccacaccctcaccttt

SEQ ID NO: 1434 - DNA, 120 bp, synthetic construct
  misc_feature 1..120: note = Description of artificial sequence: synthetic polynucleotide sequence
  source 1..120: mol_type = other DNA
atcgctctctggaatttgcacggacaggcattgttccttggaattgtgctgttcatcttcgggtgcttacttggtaagatctaacattccctaggaattatttaccacacccccactttt

SEQ ID NO: 1435 - DNA, 120 bp, synthetic construct
  misc_feature 1..120: note = Description of artificial sequence: synthetic polynucleotide sequence
  source 1..120: mol_type = other DNA
tatctgcaacaaaactggtggactctattggttgatctcctttggctcctcctgtttctggcgattttgatctggatgtattaccatggacaacgacacagtgatgaacaccaccacgat

SEQ ID NO: 1436 - DNA, 120 bp, synthetic construct
  misc_feature 1..120: note = Description of artificial sequence: synthetic polynucleotide sequence
  source 1..120: mol_type = other DNA
ccaaccctaacactcttttttcaacgcagtcttaggtatctggatctacttattggagatgctctggcgacttggtgccaccatctggcagcttttggccttcttcctagccttcttcct

SEQ ID NO: 1437 - DNA, 120 bp, synthetic construct
  misc_feature 1..120: note = Description of artificial sequence: synthetic polynucleotide sequence
  source 1..120: mol_type = other DNA
attgcagaaggtttaagacttctcctggctaggtgtcacgtagaaaggactaccgaggatggaaattgggtcgccggtgtgttcgtatatggaggtagtaagacctccctttacaacctc

SEQ ID NO: 1438 - DNA, 120 bp, synthetic construct
  misc_feature 1..120: note = Description of artificial sequence: synthetic polynucleotide sequence
  source 1..120: mol_type = other DNA
ggagccctttgtatactcctactgatgagtaagtattacaccctttgccccacaccccctttcccttactcttccttctctaacgcactttctcctctttccccagtcaccctcctgctc

SEQ ID NO: 1439 - DNA, 120 bp, synthetic construct
  misc_feature 1..120: note = Description of artificial sequence: synthetic polynucleotide sequence
  source 1..120: mol_type = other DNA
agagttctcctggctaggagtcacgtagaaaggactaccgaggaaggaaattgggtcgccggtgtgttcgtatatggaggtagtaagacctccctttacaacctcaggcgaggaattgcc

SEQ ID NO: 1440 - DNA, 120 bp, synthetic construct
  misc_feature 1..120: note = Description of artificial sequence: synthetic polynucleotide sequence
  source 1..120: mol_type = other DNA
cttgctgttccacaatgtcgtattacaccattgagtcgtctcccctttggaatggcccctggacccggcccacaacctggcccactaagggagtccattgtctgttatttcatggtcttt

SEQ ID NO: 1441 - DNA, 120 bp, synthetic construct
  misc_feature 1..120: note = Description of artificial sequence: synthetic polynucleotide sequence
  source 1..120: mol_type = other DNA
ccaagcactggaccccggggtcagggtgatggaggcaggcgcaaaaaaggagggtggtttggaaagcatcgtggtcaaggaggttccaacccgaaatttgagaacattgcagaaggttta

SEQ ID NO: 1442 - DNA, 120 bp, synthetic construct
  misc_feature 1..120: note = Description of artificial sequence: synthetic polynucleotide sequence
  source 1..120: mol_type = other DNA
tcaaaacctaggcgcacctggaggtggtcctgacaatggcccacaggaccctgacaacactgatgacaatggcccacaggaccctgacaacactgatgacaatggcaacactgatgacaa

SEQ ID NO: 1443 - DNA, 120 bp, synthetic construct
  misc_feature 1..120: note = Description of artificial sequence: synthetic polynucleotide sequence
  source 1..120: mol_type = other DNA
ggaggccttggtctactcctactgatgagtaagtattacaccctttgccccccaccccctttcccttacgcttccttctctaacgcactttctcctctttccccagtcaccctcctactc

SEQ ID NO: 1444 - DNA, 120 bp, synthetic construct
  misc_feature 1..120: note = Description of artificial sequence: synthetic polynucleotide sequence
  source 1..120: mol_type = other DNA
tggcccacaggaccctgacaacactgatgacaatggcccacatgacccgctgcctcataaccctagcgactctgctggaaatgatggaggccctccaaatttgacggaagaggttgaaaa

SEQ ID NO: 1445 - DNA, 120 bp, synthetic construct
  misc_feature 1..120: note = Description of artificial sequence: synthetic polynucleotide sequence
  source 1..120: mol_type = other DNA
acactgatgacaatggcccacaggaccctgacaacactgatgacaatggcccacatgacccgctgcctcataaccctagcgactctgctggaaatgatggaggccctccaaatttgacgg

SEQ ID NO: 1446 - DNA, 120 bp, synthetic construct
  misc_feature 1..120: note = Description of artificial sequence: synthetic polynucleotide sequence
  source 1..120: mol_type = other DNA
gacaacactgatgacaatggcccacaggaccctgacaacactgctgacaatggcccacatgacccgctgcctcataaccctagcgactctgctggaaatgatggaggcccaccaaatttg

SEQ ID NO: 1447 - DNA, 120 bp, synthetic construct
  misc_feature 1..120: note = Description of artificial sequence: synthetic polynucleotide sequence
  source 1..120: mol_type = other DNA
cactgatgacaatggcccacaggaccctgacaacactgatgacaatggcccacaggaccctgacaacactgatgacaatggcccacaggaccctgacaacactgatgacaatggcccaca

SEQ ID NO: 1448 - DNA, 120 bp, synthetic construct
  misc_feature 1..120: note = Description of artificial sequence: synthetic polynucleotide sequence
  source 1..120: mol_type = other DNA
acgacacactgatgaacaccaccacgatgactccctcccgcaccctcaacaagctaccgacgattctagccatgaatctgactctaactccaacgagggcagacaccacctgctcgtgag

SEQ ID NO: 1449 - DNA, 120 bp, synthetic construct
  misc_feature 1..120: note = Description of artificial sequence: synthetic polynucleotide sequence
  source 1..120: mol_type = other DNA
acgacacagtgatgaacaccaccacgatgactccctcccgcaccctcaacaagctaccgatgattctggccatgaatctgactctaactccaacgagggcagacaccacctgctcgtgag

SEQ ID NO: 1450 - DNA, 120 bp, synthetic construct
  misc_feature 1..120: note = Description of artificial sequence: synthetic polynucleotide sequence
  source 1..120: mol_type = other DNA
tgacccgctgcctcataaccctagcgactctgctggaaatgatggaggccctccaaatttgacggaagaggttgaaaacaaaggaggtgaccgggacccgccttcgatgacagacggtgg

SEQ ID NO: 1451 - DNA, 120 bp, synthetic construct
  misc_feature 1..120: note = Description of artificial sequence: synthetic polynucleotide sequence
  source 1..120: mol_type = other DNA
tagaaggccatttttccaccctgtaggggatgccgattattttgaatacctccaagaaggtggcccagatggtgagcctgacgtgcccccgggagcgatagagcagggccccacagatga

SEQ ID NO: 1452 - DNA, 120 bp, synthetic construct
  misc_feature 1..120: note = Description of artificial sequence: synthetic polynucleotide sequence
  source 1..120: mol_type = other DNA
aggcgaggaattggccttgctattccacaatgtcgtcttacaccattgagtcgtctcccctttggaatggcccctggacccggcccacaacctggcccactaagggagtccattgtctgt

SEQ ID NO: 1453 - DNA, 120 bp, synthetic construct
  misc_feature 1..120: note = Description of artificial sequence: synthetic polynucleotide sequence
  source 1..120: mol_type = other DNA
ccctagcgactctgctggaaatgatggaggccctccacaattgacggaagaggttgaaaacaaaggaggtgaccagggcccgcctttgatgacagacggaggcggcggtcatagtcatga

SEQ ID NO: 1454 - DNA, 120 bp, synthetic construct
  misc_feature 1..120: note = Description of artificial sequence: synthetic polynucleotide sequence
  source 1..120: mol_type = other DNA
aagaggttgaaaacaaaggaggtgaccgggacccgccttcgatgacagacggtggcggcggtgatccacaccttcctacgctgcttttgggtacttctggttccggtggagatgatgacg

SEQ ID NO: 1455 - DNA, 120 bp, synthetic construct
  misc_feature 1..120: note = Description of artificial sequence: synthetic polynucleotide sequence
  source 1..120: mol_type = other DNA
atgtctgacgagggaccaggtacaggacctggaaatggcctaggacagaaggaagacacatctggaccagacggctccagcggcagtggacctcaaagaagagggggggataaccatgga

SEQ ID NO: 1456 - DNA, 120 bp, synthetic construct
  misc_feature 1..120: note = Description of artificial sequence: synthetic polynucleotide sequence
  source 1..120: mol_type = other DNA
tctcaaaacctaggcgcacctggaggtggtcctgacaatggcccacaggaccctgacaacactgatgacaatggcccacaggaccctgacaacactgatgacaatggcccacaggaccct

SEQ ID NO: 1457 - DNA, 120 bp, synthetic construct
  misc_feature 1..120: note = Description of artificial sequence: synthetic polynucleotide sequence
  source 1..120: mol_type = other DNA
cactgatgacaatggcccacatgacccgctgcctcaggaccctgacaacactgatgacaatggcccacaggaccctgacaacactgatgacaatggcccacatgacccgctgcctcatag

SEQ ID NO: 1458 - DNA, 120 bp, synthetic construct
  misc_feature 1..120: note = Description of artificial sequence: synthetic polynucleotide sequence
  source 1..120: mol_type = other DNA
ggtagaaggccatttttccaccctgtagcggaagccgattattttgaataccaccaagaaggtggcccagatggtgagcctgacatgcccccgggagcgatagagcagggccccgcagat

SEQ ID NO: 1459 - DNA, 120 bp, synthetic construct
  misc_feature 1..120: note = Description of artificial sequence: synthetic polynucleotide sequence
  source 1..120: mol_type = other DNA
cccaggagaaggcccaagcactggaccccggggtcagggtgatggaggcaggcgcaaaaaaggagggtggtttggaaagcatcgtggtcaaggaggttccaacccgaaatttgagaacat

SEQ ID NO: 1460 - DNA, 120 bp, synthetic construct
  misc_feature 1..120: note = Description of artificial sequence: synthetic polynucleotide sequence
  source 1..120: mol_type = other DNA
atgtctgacgaggggccaggtacaggacctggaaatggcctaggacagaaggaagactcatctggaccagaaggctccggcggcagtggacctcaaagaagagggggggataaccatgga

SEQ ID NO: 1461 - DNA, 120 bp, synthetic construct
  misc_feature 1..120: note = Description of artificial sequence: synthetic polynucleotide sequence
  source 1..120: mol_type = other DNA
acggaagaggttgaaaacaaaggaggtgaccggggcccgccttcgatgacagacggtggcggcggtgatccacaccttcctacgctgcttttgggtacttctggttccggtggagatgat

SEQ ID NO: 1462 - DNA, 120 bp, synthetic construct
  misc_feature 1..120: note = Description of artificial sequence: synthetic polynucleotide sequence
  source 1..120: mol_type = other DNA
aggcgaggaactgcccttgctattccacaatgtcgtcttacaccattgagtcgtctcccctttggaatggcccctggacccggcccacaacctggcccgctaagggagtccattgtctgt

SEQ ID NO: 1463 - DNA, 120 bp, synthetic construct
  misc_feature 1..120: note = Description of artificial sequence: synthetic polynucleotide sequence
  source 1..120: mol_type = other DNA
gacccaggagaaggcccaagcactggaccccggggtcagggtgatggaggcaggcgcaaaaaaggagggtggtttggaaagcatcgtggtcaaggaggttccaacccgaaatttgagaac

SEQ ID NO: 1464 - DNA, 120 bp, synthetic construct
  misc_feature 1..120: note = Description of artificial sequence: synthetic polynucleotide sequence
  source 1..120: mol_type = other DNA
gacccaggagaaggcccaagcactggaccccggggtcagggtgatggaggcaggcgcaaaaaaggagggtggtatggaaagcatcgtggtgaaggaggttccagccagaaatttgagaac

SEQ ID NO: 1465 - DNA, 120 bp, synthetic construct
  misc_feature 1..120: note = Description of artificial sequence: synthetic polynucleotide sequence
  source 1..120: mol_type = other DNA
gacgatggagtagatttgcctccctggtttccacctatggtggaaggggctgccgcggagggtgatgacggagatgacggagatgaaggaggtgatggagatgagggtgaggaagggcag

SEQ ID NO: 1466 - DNA, 120 bp, synthetic construct
  misc_feature 1..120: note = Description of artificial sequence: synthetic polynucleotide sequence
  source 1..120: mol_type = other DNA
ttccaccctgtaggggatgccgattattttgaatacctccaagaaggtggcccagatggtgagcctgacgtgcccccgggagcgatagagcagggccccacagatgacccaggagaaggc

SEQ ID NO: 1467 - DNA, 120 bp, synthetic construct
  misc_feature 1..120: note = Description of artificial sequence: synthetic polynucleotide sequence
  source 1..120: mol_type = other DNA
cgtgaaagagccagggggagaggtcgtggacgtggtgaaaagaggcccaggagtcccagtagtcagtcatcatcatccgggtctccaccgcgcaggccccctccaggtagaaggccattt

SEQ ID NO: 1468 - DNA, 120 bp, synthetic construct
  misc_feature 1..120: note = Description of artificial sequence: synthetic polynucleotide sequence
  source 1..120: mol_type = other DNA
gactccctcccgcaccctcaacaagctaccgatgattctggccatgaatctgactctaactccaacgagggcagacaccacctgctcgtgactggagccggcgacggacccccactctgc

SEQ ID NO: 1469 - DNA, 120 bp, synthetic construct
  misc_feature 1..120: note = Description of artificial sequence: synthetic polynucleotide sequence
  source 1..120: mol_type = other DNA
tggagccggcgacggacccccactctgctctcaaaacctaggcgcacctggaggtggtcctgacaatggcccacaggaccctgacaacactgatgacaatggcccacaggaccctgacaa

SEQ ID NO: 1470 - DNA, 120 bp, synthetic construct
  misc_feature 1..120: note = Description of artificial sequence: synthetic polynucleotide sequence
  source 1..120: mol_type = other DNA
cgaggacggggaagaggacgaggacgaggaggcggaagaccaggagctccgggcggctcaggatcagggccaagacatagagatggtgtccggagaccccaaaaacgtccaagttgcatt

SEQ ID NO: 1471 - DNA, 120 bp, synthetic construct
  misc_feature 1..120: note = Description of artificial sequence: synthetic polynucleotide sequence
  source 1..120: mol_type = other DNA
tggggccggcgacggacccccactctgctctcaaaacctaggcgcacctggaggtggtcctgacaatggcccacaggaccctgacaacactgatgacaatggcccacaggaccctgacaa

SEQ ID NO: 1472 - DNA, 120 bp, synthetic construct
  misc_feature 1..120: note = Description of artificial sequence: synthetic polynucleotide sequence
  source 1..120: mol_type = other DNA
ctccctcccgcaccctcaacaagctaccgacgattctagccatgaatctgactctaactccaacgagggcagacaccacctgctcgtgagtggggccggcgacggacccccactctgctc

SEQ ID NO: 1473 - DNA, 120 bp, synthetic construct
  misc_feature 1..120: note = Description of artificial sequence: synthetic polynucleotide sequence
  source 1..120: mol_type = other DNA
tatatcgttatgagtaactggactggaggagcgctccttgtcctctattcctttgctctcatgcttattattatcattctcatcatctttatcttcagaagagaccttctctgtccactt

SEQ ID NO: 1474 - DNA, 120 bp, synthetic construct
  misc_feature 1..120: note = Description of artificial sequence: synthetic polynucleotide sequence
  source 1..120: mol_type = other DNA
tatttcatggtctttttacaaactcatatatttgctgaggttttgaaggatgcgattaaggaccttgttatgacaaagcccgctcctacctgcaatatcagggtgactgtgtgcagcttt

SEQ ID NO: 1475 - DNA, 120 bp, synthetic construct
  misc_feature 1..120: note = Description of artificial sequence: synthetic polynucleotide sequence
  source 1..120: mol_type = other DNA
ttacaaactcatatatttgctgaggttttgaaggatgcgattaaggaccttgttatgacaaagcccgctcctacctgcaatatcaaggtgactgtgtgcagctttgacgatggagtagat

SEQ ID NO: 1476 - DNA, 120 bp, synthetic construct
  misc_feature 1..120: note = Description of artificial sequence: synthetic polynucleotide sequence
  source 1..120: mol_type = other DNA
tctacaacaaaactggtggactctattggttgatctcctttggctcctcctgtttctggcgattttaatctggatgtattaccatggacaacgacacagtgatgaacaccaccacgatga

SEQ ID NO: 1477 - DNA, 120 bp, synthetic construct
  misc_feature 1..120: note = Description of artificial sequence: synthetic polynucleotide sequence
  source 1..120: mol_type = other DNA
cttaggtatctggatctacttattggagatgctctggcgacttggtgccaccatctggcagcttttggccttcttcctagccttcttcctagacctcatcctgctcattattgctctcta

SEQ ID NO: 1478 - DNA, 120 bp, synthetic construct
  misc_feature 1..120: note = Description of artificial sequence: synthetic polynucleotide sequence
  source 1..120: mol_type = other DNA
attgcagaaggtttaagagttctcctggctaggagtcacgtagaaaggactaccgaggaaggaaattgggtcgccggtgtgttcgtatatggaggtagtaagacctccctttacaacctc

SEQ ID NO: 1479 - DNA, 120 bp, synthetic construct
  misc_feature 1..120: note = Description of artificial sequence: synthetic polynucleotide sequence
  source 1..120: mol_type = other DNA
attgcagaaggtttaagagctctcctggctaggagtcacgtagaaaggactaccgacgaaggaacttgggtcgccggtgtgttcgtatatggaggtagtaagacctccctttacaaccta

SEQ ID NO: 1480 - DNA, 120 bp, synthetic construct
  misc_feature 1..120: note = Description of artificial sequence: synthetic polynucleotide sequence
  source 1..120: mol_type = other DNA
gtcttaggtctctggatctacttattggagattctctggcgacttggtgccaccatctggcagcttttggccttcttcctagccttcttcctagacctcatcctgctcattattgctctc

SEQ ID NO: 1481 - DNA, 120 bp, synthetic construct
  misc_feature 1..120: note = Description of artificial sequence: synthetic polynucleotide sequence
  source 1..120: mol_type = other DNA
cttaggtctctggatctacttcttggagatcctctggcggcttggtgccaccatctggcagcttttggccttcatcctagccttcttcctagccatcatcctgcttattattgctctcta

SEQ ID NO: 1482 - DNA, 120 bp, synthetic construct
  misc_feature 1..120: note = Description of artificial sequence: synthetic polynucleotide sequence
  source 1..120: mol_type = other DNA
ccagccctaacactctttttttcaacgcagtcttaggtctctggatctacttcttggagattctctggcggcttggtgccaccatctggcagcttttggccttcatcctagccttcttcc

SEQ ID NO: 1483 - DNA, 120 bp, synthetic construct
  misc_feature 1..120: note = Description of artificial sequence: synthetic polynucleotide sequence
  source 1..120: mol_type = other DNA
caaaggaggtgaccggggcccgccttcgatgacagacggtggcggcggtgatccacaccttcctacgctgcttttgggtacttctggttccggtggagatgatgacgacccccacggccc

SEQ ID NO: 1484 - DNA, 120 bp, synthetic construct
  misc_feature 1..120: note = Description of artificial sequence: synthetic polynucleotide sequence
  source 1..120: mol_type = other DNA
cgaggacggggaagaggacgaggacgaggaggcggaagaccaggagctccgggcggctcaggagcggctcaggatcagggccaagacatagagatggtgtccggagaccccaaaaacgtc

SEQ ID NO: 1485 - DNA, 120 bp, synthetic construct
  misc_feature 1..120: note = Description of artificial sequence: synthetic polynucleotide sequence
  source 1..120: mol_type = other DNA
atggaacacgaccttgagaggggcccaccgggcccgcgacggccccctcgaggaccccccctctcctcttccctaggccttgctctccttctcctcctcttggcgctactgttttggctg

SEQ ID NO: 1486 - DNA, 120 bp, synthetic construct
  misc_feature 1..120: note = Description of artificial sequence: synthetic polynucleotide sequence
  source 1..120: mol_type = other DNA
atggaacgcgaccttgagaggggcccaccgggcccgccacggccccctctaggaccccccctctcctcttccataggccttgctctccttctcctgctcttggcgctactgttctggctg

SEQ ID NO: 1487 - DNA, 120 bp, synthetic construct
  misc_feature 1..120: note = Description of artificial sequence: synthetic polynucleotide sequence
  source 1..120: mol_type = other DNA
ggtggaggccggggtcgaggaggcagtggaggccggggtcgaggaggcagtggaggccggggtcgaggaggtagtggaggccgccggggtagaggacgtgaaagagccagggggaggagt

SEQ ID NO: 1488 - DNA, 120 bp, synthetic construct
  misc_feature 1..120: note = Description of artificial sequence: synthetic polynucleotide sequence
  source 1..120: mol_type = other DNA
tacatcgttatgagtgactggactggaggagccctccttgtcctctattcctttgctctcatacttataattataattttgatcatctttatcttcagaagagaccttctctgtccactt

SEQ ID NO: 1489 - DNA, 120 bp, synthetic construct
  misc_feature 1..120: note = Description of artificial sequence: synthetic polynucleotide sequence
  source 1..120: mol_type = other DNA
tacatcgttatgagtgactggactggaggagccctccttgtcctctattcctttgctctcatgcttataattataattttgatcatctttatcttcagaagagaccttctctgtccactt

SEQ ID NO: 1490 - DNA, 120 bp, synthetic construct
  misc_feature 1..120: note = Description of artificial sequence: synthetic polynucleotide sequence
  source 1..120: mol_type = other DNA
tatttcattgtctttttacaaactcatatatttgctgagggtttgaaggatgcgattaaggaccttgttttgccaaagcccgctcctacctgcaatatcaaggtgactgtgtgcagcttt

SEQ ID NO: 1491 - DNA, 120 bp, synthetic construct
  misc_feature 1..120: note = Description of artificial sequence: synthetic polynucleotide sequence
  source 1..120: mol_type = other DNA
cacgacacactgatgaacaccaccacgatgactccctcccgcaccctcaacaagctaccgacgattctagccatgaatctgactctaactccaacgagggcagacaccacctgctcgtga

SEQ ID NO: 1492 - DNA, 120 bp, synthetic construct
  misc_feature 1..120: note = Description of artificial sequence: synthetic polynucleotide sequence
  source 1..120: mol_type = other DNA
gcgaggaattgcccttgctgttccacaatgtcgtattacaccattgagtcgtctcccctttggaatggcccctggacccggcccacaacctggcccactaagggagtccattgtctgtta

SEQ ID NO: 1493 - DNA, 120 bp, synthetic construct
  misc_feature 1..120: note = Description of artificial sequence: synthetic polynucleotide sequence
  source 1..120: mol_type = other DNA
gcctcaggaccctgacaacactgatgacaatggcccacaggaccctgacaacactgatgacaatggcccacatgacccgctgcctcatagccctagcgactctgctggaaatgatggagg

SEQ ID NO: 1494 - DNA, 120 bp, synthetic construct
  misc_feature 1..120: note = Description of artificial sequence: synthetic polynucleotide sequence
  source 1..120: mol_type = other DNA
atgtctgacgaggggccaggtacaggacctggaaatggcctaggagagaagggagacacatctggaccagaaggctccggcggcagtggacctcaaagaagagggggtgataaccatgga

SEQ ID NO: 1495 - DNA, 120 bp, synthetic construct
  misc_feature 1..120: note = Description of artificial sequence: synthetic polynucleotide sequence
  source 1..120: mol_type = other DNA
ggtagaaggccatttttccaccctgtaggggaagccgattattttgaataccaccaagaaggtggcccagatggtgagcctgacgtgcccccgggagcgatagagcagggccccgcagat

SEQ ID NO: 1496 - DNA, 120 bp, synthetic construct
  misc_feature 1..120: note = Description of artificial sequence: synthetic polynucleotide sequence
  source 1..120: mol_type = other DNA
cgaggacggggaagaggacgaggacgaggaggcggaagaccaggagccccgggcggctcaggatcagggccaagacatagagatggtgtccggagaccccaaaaacgtccaagttgcatt

SEQ ID NO: 1497 - DNA, 120 bp, synthetic construct
  misc_feature 1..120: note = Description of artificial sequence: synthetic polynucleotide sequence
  source 1..120: mol_type = other DNA
gccagggggggaagtcgtgaaagagccagggggagaggtcgtggacgtggagaaaagaggcccaggagtcccagtagtcagtcatcatcatccgggtctccaccgcgcaggccccctcca

SEQ ID NO: 1498 - DNA, 120 bp, synthetic construct
  misc_feature 1..120: note = Description of artificial sequence: synthetic polynucleotide sequence
  source 1..120: mol_type = other DNA
gccagggggaggagtcgtgaaagagccagggggagaggtcgtggacgtggtgaaaagaggcccaggagtcccagtagtcagtcatcatcatccgggtctccaccgcgcaggccccctcca

SEQ ID NO: 1499 - DNA, 120 bp, synthetic construct
  misc_feature 1..120: note = Description of artificial sequence: synthetic polynucleotide sequence
  source 1..120: mol_type = other DNA
ccagccctaacactcttttttcaacgcagtcttaggtctctggatctacttcttggagattctctggcggcttggtgccaccatctggcagcttttggccttcatcctagccttcttcct

SEQ ID NO: 1500 - DNA, 120 bp, synthetic construct
  misc_feature 1..120: note = Description of artificial sequence: synthetic polynucleotide sequence
  source 1..120: mol_type = other DNA
tatttcatggtctttttacaaactcatatatttgctgaggttttgaaggatgcgattaaggaccttgttatgacaaagcccgctcctacctgcaatatcaaggtgactgtgtgcagcttt

SEQ ID NO: 1501 - DNA, 120 bp, synthetic construct
  misc_feature 1..120: note = Description of artificial sequence: synthetic polynucleotide sequence
  source 1..120: mol_type = other DNA
tatatcgttctgagtaactggactggaggagcgctccttgtcctctattcctttgctctcatgcttattattatcattctcatcatctttatcttcagaagagaccttctctgtccactt

SEQ ID NO: 1502 - DNA, 120 bp, synthetic construct
  misc_feature 1..120: note = Description of artificial sequence: synthetic polynucleotide sequence
  source 1..120: mol_type = other DNA
agccatcatcctgcttattattgctctctatctacaacaaaactggtggactctattggttgatctcctttggctcctcctgtttatggccattttaatctggatgtattatcatggacc

What is claimed is:

1. A panel of oligonucleotides for characterizing a genetic alteration associated with classical Hodgkin's Lymphoma (cHL), or a related lymphoid malignancy, wherein the panel of oligonucleotides characterize one or more of (i) a non-synonymous mutation in a polynucleotide(s) encoding a polypeptide(s) selected from the group consisting of ACTbeta, ADGRG6, ARID1A, B2M, CSF2RB, DNAH12, EEF1A1, GNA13, HLA-B, IGLL5, IKBKB, NFKBIA, NFKBIE, RBM38, SOCS1, STAT6, TNFAIP3, and XPO1; (ii) a structural variation in a polynucleotide(s) encoding a polypeptide(s) selected from the group consisting of CIITA and ETV6; and/or (iii) a copy number variation in a chromosomal locus selected from the group consisting of 2p, 2p15, 5p, 5q, 5p15.33, 9p, 9p24.1, 1p36.32, 1q41, 6p21.32, 6q, 6q12, 6q23.3, and 18q22.2.

2. The panel of nucleotides of claim 1, wherein the chromosomal locus is selected from the group consisting of 2p15, 9p24.1, 1p36.32, 6p21.32, and 6q23.3′; and
wherein the oligonucleotides characterizing the copy number variation characterize a copy number variation in a polynucleotide encoding a polypeptide selected from the group consisting of HLA-B, JAK2, NFKBIE, PD-L1, PD-L2, SOCS6, TNFAIP3, and XPO1.

3. A panel of oligonucleotides for characterizing a genetic alteration associated with primary mediastinal B-cell lymphoma (PMBL), or a related lymphoid malignancy, wherein the panel of oligonucleotides characterize one or more of (i) a non-synonymous mutation in a polynucleotide(s) encoding a polypeptide(s) selected from the group consisting of B2M, CSF2RB, EZH2, GNA13, HIST2H2BE, HIST1H1E, IRF2BP2, IKZF3, IL4R, PAX5, STAT6, TP53, TNFAIP3, and XPO1, ZNF217; (ii) a structural variation in a polynucleotide(s) encoding a polypeptide(s) selected from the group consisting of CIITA, PD-L1, and PD-L2; and/or (iii) a copy number variation in a chromosomal locus selected from the group consisting of 2p, 2q, 2p16.1, 5p, 5q, 7p, 9p24.1, 9p, 9q, 6p21.33, 6q23.3, 7q, 15q15.3, 16p13.3, 19q13.32, 21q, and 22q13.2.

4. The panel of oligonucleotides of claim 1, wherein the panel further comprises oligonucleotides useful in characterizing one or more microsatellite loci selected from the group consisting of MSH2, MSH3, MSH6, MLH1, EXO1, PMS2, POLD1, and POLE; or
wherein the panel further comprises oligonucleotides that hybridize to LMP1 and/or EBNA1 genes of one or more Epstein bar viruses.

5. The panel of claim 1, wherein the oligonucleotides comprise unique molecular indices (UMIs).

6. A method of characterizing a genetic alteration associated with classical Hodgkin's Lymphoma (cHL), primary mediastinal B-cell lymphoma (PMBL), or a related lymphoid malignancy, the method comprising contacting a biological sample with the panel of claim 1.

7. A method for characterizing tumor fraction and/or molecular tumor burden in a biological sample from a subject having or suspected of having classical Hodgkin's lymphoma (cHL) or primary mediastinal B-cell lymphoma (PMBL), the method comprising:
(a) sequencing polynucleotides derived from a biological sample to obtain sequence data, wherein the sequencing comprises targeted sequencing carried out using the panel of claim 1;
(b) analyzing the sequence data to characterize copy number alterations, non-synonymous mutations, and structural variations;
(c) calculating three tumor fraction estimates, wherein the tumor fraction estimates are individually calculated based upon each of 1) the characterization of the copy number alterations, 2) the characterization of the non-synonymous mutations, and 3) the characterization of the structural variations, respectively; and
(d) calculating a weighted sum of the tumor fraction estimates, thereby characterizing tumor fraction in the biological sample.

8. A method for selecting a subject for a treatment for classical Hodgkin's lymphoma, primary mediastinal B cell lymphoma (PMBL), or a related lymphoid malignancy, the method comprising:
(a) sequencing polynucleotides derived from a biological sample to obtain sequence data, wherein the sequencing comprises targeted sequencing carried out using the panel of claim 1;
(b) analyzing the sequence data to characterize copy number alterations, non-synonymous mutations, and structural variations;
(c) calculating three tumor fraction estimates, wherein the tumor fraction estimates are individually calculated based upon each of 1) the characterization of the copy number alterations, 2) the characterization of the non-synonymous mutations, and 3) the characterization of the structural variations, respectively; and
(d) calculating a weighted sum of the tumor fraction estimates, wherein an increase in the weighted sum relative to a reference sequence selects the subject for treatment with an immune checkpoint blockade.

9. The method of claim 8, wherein the immune checkpoint blockade comprises an agent selected from the group consisting of Atezolizumab, Avelumab, BMS-936559, Cemiplimab, Durvalumab, Nivolumab, Pembrolizumab, Sintilimab, and Tislelizumab.

10. The method of claim 9, wherein the agent comprises a combination of nivolumab, ifosfamide, carboplatin, and etoposide.

11. A method of characterizing a classical Hodgkin's Lymphoma (cHL), or a related lymphoid malignancy, the method comprising carrying out targeted sequencing of polynucleotides from a biological sample using a panel of oligonucleotides, wherein the panel of oligonucleotides are useful in the characterization of one or more of (i) a non-synonymous mutation in a polynucleotide(s) encoding a polypeptide selected from the group consisting of ACTbeta, ADGRG6, ARID1A, B2M, CSF2RB, DNAH12, EEF1A1, GNA13, HLA-B, IGLL5, IKBKB, NFKBIA, NFKBIE, RBM38, SOCS1, STAT6, TNFAIP3, and XPO1; (ii) a structural variation in a polynucleotide(s) encoding a polypeptide(s) selected from the group consisting of CIITA and ETV6; and/or (iii) a copy number variation in a chromosomal locus selected from the group consisting of 2p, 2p15, 5p, 5q, 5p15.33, 9p, 9p24.1, 1p36.32, 1q41, 6p21.32, 6q, 6q12, 6q23.3, and 18q22.2.

12. A method of characterizing a primary mediastinal B-cell lymphoma (PMBL), or a related lymphoid malignancy, the method comprising carrying out targeted sequencing of polynucleotides from a biological sample using a panel of oligonucleotides, wherein the panel of oligonucleotides are useful in the characterization of one or more of (i) a non-synonymous mutation in a polynucleotide(s) encoding a polypeptide selected from the group consisting of B2M, CSF2RB, EZH2, GNA13, HIST2H2BE, HIST1H1E, IRF2BP2, IKZF3, IL4R, PAX5, STAT6, TP53, TNFAIP3, and XPO1, ZNF217; (ii) a structural variation in a polynucleotide(s) encoding a polypeptide(s) selected from the group consisting of CIITA, PD-L1, and PD-L2; and/or (iii) a copy number variation in a chromosomal locus selected from the group consisting of 2p, 2q, 2p16.1, 5p, 5q, 7p, 9p24.1, 9p, 9q, 6p21.33, 6q23.3, 7q, 15q15.3, 16p13.3, 19q13.32, 21q, and 22q13.2.

13. A method for treating a selected patient having or at risk of developing cHL, PMBL, or a related lymphoid malignancy, the method comprising administering to the patient an immune checkpoint blockade agent wherein the patient is selected by characterizing a biological sample of the patient using the oligonucleotide panel of claim 1.

14. The method of claim 13, wherein the immune checkpoint blockade comprises an agent selected from the group consisting of Atezolizumab, Avelumab, BMS-936559, Cemiplimab, Durvalumab, Nivolumab, Pembrolizumab, Sintilimab, and Tislelizumab.

15. The method of claim 13, wherein the agent comprises a combination of nivolumab, ifosfamide, carboplatin, and etoposide.

16. A method for treating a selected patient having or at risk of developing cHL, PMBL, or a related lymphoid malignancy, the method comprising administering to the patient a PD-1 blockade agent or a JAK/Stat inhibitor, wherein the patient is selected by characterizing a biological sample of the patient using the oligonucleotide panel of claim 1.

17. A method for treating a selected patient having or at risk of developing cHL, PMBL, or a related lymphoid malignancy, the method comprising administering to the patient a PD-1 blockade agent or a JAK/Stat inhibitor, wherein the patient is selected by characterizing a biological sample of the patient using the oligonucleotide panel of claim 1 at a first point in time and comparing results from the characterization with a biological sample of the patient obtained at a second point in time.

18. A method for assessing a response to therapy for treatment of classical Hodgkin's Lymphoma (cHL), primary mediastinal B-cell lymphoma (PMBL), or a related lymphoid malignancy, based on changes in ctDNA, the method comprising characterizing one or more of (i) a non-synonymous mutation in a polynucleotide(s) encoding a polypeptide(s) selected from the group consisting of ACTbeta, ADGRG6, ARID1A, B2M, CSF2RB, DNAH12, EEF1A1, EZH2, GNA13, HLA-B, HIST2H2BE, HIST1H1E, IGLL5, IKBKB, IRF2BP2, IKZF3, IL4R, NFKBIA, NFKBIE, RBM38, SOCS1, STAT6, TNFAIP3, TP53, XPO1 and ZNF217; (ii) a structural variation in a polynucleotide(s) encoding a polypeptide(s) selected from the group consisting of CIITA, ETV6, PD-L1, and PD-L2; and/or (iii) a copy number loss or gain in a chromosomal locus selected from the group consisting of 2p, 2p15, 2q, 2p16.1, 5p, 5q, 5p15.33, 6p21.33, 7p, 7q, 9p, 9q, 9p24.1, 1p36.32, 1q41, 6p21.32, 6q, 6q12, 6q23.3, 15q15.3, 16p13.3, 18q22.2, 21q, and 22q13.2.

19. A targeted sequencing panel comprising oligonucleotides suitable for use in targeted sequencing to characterize two or more classes of variants in circulating tumor DNA, wherein the panel of oligonucleotides characterize one or more of (i) a non-synonymous mutation in a polynucleotide(s) encoding a polypeptide(s) selected from the group consisting of ACTbeta, ADGRG6, ARID1A, B2M, CSF2RB, DNAH12, EEF1A1, EZH2, GNA13, HLA-B, HIST2H2BE, HIST1H1E, IGLL5, IKBKB, IRF2BP2, IKZF3, IL4R, NFKBIA, NFKBIE, RBM38, SOCS1, STAT6, TNFAIP3, TP53, XPO1 and ZNF217; (ii) a structural variation in a polynucleotide(s) encoding a polypeptide(s) selected from the group consisting of CIITA, ETV6, PD-L1, and PD-L2; and/or (iii) a copy number loss or gain in a chromosomal locus selected from the group consisting of 2p, 2p15, 2q, 2p16.1, 5p, 5q, 5p15.33, 6p21.33, 7p, 7q, 9p, 9q, 9p24.1, 1p36.32, 1q41, 6p21.32, 6q, 6q12, 6q23.3, 15q15.3, 16p13.3, 18q22.2, 21q, and 22q13.2, wherein the oligonucleotides are suitable for use in targeted sequencing to characterize all of the variants targeted by the baits listed in Table 1.

20. A targeted sequencing panel comprising polynucleotides with at least 85% sequence identity over a span of at least 80 nucleotides to all baits listed in Table 1 or Table 2.
